(19) United States
(12) Patent Application Publication
(10) Pub. No.: US 2025/0270332 A1
(43) Pub. Date: Aug. 28, 2025

(54) Tetravalent FZD and WNT Co-Receptor Binding Antibody Molecules and Uses Thereof

(71) Applicant: AntlerA Therapeutics Inc., Toronto, Ontario (CA)

(72) Inventors: Stephane ANGERS, Mississauga, Ontario (CA); Sachdev SIDHU, Toronto, Ontario (CA); Levi BLAZER, Etobicoke, Ontario (CA); Jarrett ADAMS, Toronto, Ontario (CA); Somasekar SESHAGIRI, Toronto, Ontario (CA)

(21) Appl. No.: 18/267,914

(22) PCT Filed: Dec. 17, 2021
(86) PCT No.: PCT/IB2021/061971

§ 371 Date: Jun. 16, 2023

Related U.S. Application Data
(60) Provisional application No. 63/127,408, filed on Dec. 18, 2020.

(51) Int. Cl. C07K 16/28

(52) U.S. Cl. CPC C07K 16/2863; C07K 16/28; C07K 2317/31; C07K 2317/35; C07K 2317/622

(57) ABSTRACT

Described herein are tetravalent binding antibody molecules comprising a FZD receptor binding domain and an LRP5/6 co-receptor binding domain on opposite termini of an Fc domain that activate a Wnt beta-catenin signaling pathway and methods for their use.

### SEQUENCE LISTING

[0001] The instant application contains a Sequence Listing which has been submitted electronically in ASCII format and is hereby incorporated by reference in its entirety. Said ASCII copy, created on Dec. 16, 2021, is named 117946_PD606WO_FINAL.txt and is 989,432 bytes in size.

### BACKGROUND

[0002] Wnt signaling pathways are critical for embryonic development and tissue homeostasis in adults. Wnt signaling is initiated when a Frizzled (FZD) receptor on the cell surface membrane binds with a Wnt ligand. Wnt ligands are secreted growth factors that regulate various cellular processes such as proliferation, differentiation, survival and migration.

[0003] Nineteen Wnt ligands exist in humans that interact with a network of ten Frizzled cell surface receptors (FZD) and one of several co-receptors that guide the selective engagement of different intracellular signaling branches (Wodarz, A. and Nusse, R. Annu. Rev. Cell Dev. Biol. 14, 59-88 (1998); Angers, S and Moon, R. T., transduction. Nat. Rev. Mol. Cell Biol. 10, 468-477 (2009)). FZDs have conserved structural features including seven hydrophobic transmembrane domains and a cysteine-rich ligand-binding domain. FZDs are known to function in three distinct signaling pathways, known as the Wnt planar cell polarity (PCP) pathway, the canonical Wnt/β-catenin pathway, and the Wnt/calcium pathway. The presence of Wnt co-receptors is also required to direct the differential engagement of the intracellular signaling cascades listed above. For example, Wnt ligands bind to a Frizzled receptor and a member of the low-density lipoprotein receptor-related proteins 5 and 6 (LRP5/6) co-receptor family to activate the Wnt/β-catenin pathway, or with a receptor tyrosine kinase-like orphan receptors 1 and 2 (ROR1/2), related to receptor tyrosine kinase (RYK) or protein tyrosine kinase 7 (PTK7) co-receptor to activate alternate β-catenin-independent signaling pathways.

[0004] Wnt ligands are universally important for the control of tissue stem cells self-renewal and regulation of many progenitor cell populations, but the hydrophobicity and sensitive tertiary structure of Wnt proteins makes their biochemical purification challenging and their use in vitro and in vivo inefficient. Described herein are tetravalent binding antibody molecules that activate a Wnt signaling pathway and methods for their use.

### SUMMARY OF THE INVENTION

[0005] Described herein are tetravalent binding antibody molecules that activate a Wnt signaling pathway and methods for their use. The tetravalent binding antibody molecules bind to both an FZD receptor, e.g., Frizzled Class Receptor 1 (FZD1), Frizzled Class Receptor 2 (FZD2), Frizzled Class Receptor 3 (FZD3), Frizzled Class Receptor 4 (FZD4), Frizzled Class Receptor 5 (FZD5), Frizzled Class Receptor 6 (FZD6), Frizzled Class Receptor 7 (FZD7), Frizzled Class Receptor 8 (FZD8), Frizzled Class Receptor 9 (FZD9), or Frizzled Class Receptor 10 (FZD10) and a Wnt co-receptor, e.g., LRP5 or LRP6 (LRP5/6), thereby activating a Wnt signaling pathway. In an embodiment, the tetravalent binding antibody molecules bind to both a FZD4 receptor and LRP5 and/or LRP6 and activate the Wnt/β-catenin signaling pathway. The tetravalent binding antibody molecules of this invention are also referred herein as “FZD Agonists”, Frizzled and LRP5/6 Agonist (FLAg), and in some embodiments as “ANTs”.

[0006] The tetravalent binding antibody molecules include an Fc domain comprised of CH2 and CH3 domains or fragment thereof comprising the CH3 domain, and a first bivalent binding domain that interacts with one or more FZD receptor, e.g., one or more of FZD1, FZD2, FZD3, FZD4, FZD5, FZD6, FZD7, FZD8, FZD9, and FZD10, and a second bivalent binding domain that binds a WNT co-receptor, e.g., LRP5 or LRP6, wherein the FZD binding domain is linked to one terminus of the Fc domain and the co-receptor binding domain is linked to the other terminus of the Fc domain. Thus, the binding domain for the FZD receptor and the binding domain for the WNT co-receptor are not directly linked rather they are separated by the Fc domain, or fragment thereof comprising the CH3 domain.

[0007] The Fc domain of the FZD Agonists may be an Fc domain of an immunoglobulin with or without effector function. The immunoglobulin may be an IgG, e.g., an IgG₁. In an embodiment of this invention the tetravalent binding antibody molecule comprises two polypeptides containing an Fc region that dimerize via the intrinsic ability of the Fc region in each polypeptide to dimerize or via a knob-in-holes configuration within the Fc. Thus, the Fc dimer may be a heterodimer or a homodimer. Methods for dimerizing peptides via a knob-in-hole configuration are described in WO2018/026942, inventors Van Dyk et al., Carter P. (2001) J. Immunol. Methods 248, 7-15; Ridgway et al. (1996) Protein Eng. 9, 617-621; Merchant, et al. (1998) Nat. Biotechnol. 16, 677-681, and; Atwell et al., (1997) J. Mol. Biol. 270, 26-35, all incorporated herein by reference.

[0008] In an embodiment, each of the binding domains of the FZD Agonists described herein are bivalent and each may be monospecific, having two binding sites for the same epitope of an FZD receptor, e.g., FZD4, or Wnt co-receptor, e.g. LRP5/6, or bispecific having two binding sites with each site binding a different epitope on an FZD or Wnt co-receptor, e.g., a Wnt1 binding (domain E1-E2 within the extracellular domain of LRP5/6) site and a Wnt3 binding site (domain E3-E4 within the extracellular domain of LRP5/6) within the LRP5/6 co-receptor. In an embodiment, the LRP5/6 binding domain binds to a Wnt3A site (domain E3-E4) on LRP5 and binds to a Wnt3A site (domain E3-E4) on LRP6.

[0009] In embodiments of this invention the FZD binding domain linked to the Fc domain of the FZD Agonist comprises one or more immunoglobulin heavy-chain variable domain (VH) fragments and/or one or more immunoglobulin light-chain variable domain (VL) fragments that bind the FZD, e.g., FZD4. In an embodiment of this invention the FZD binding domain may comprise Fabs, a diabody or single chain variable fragments (scFv) single-domain antibody fragments, e.g., V_{H}H, or combinations thereof that bind to the same or different epitopes on the FZD.

[0010] In an embodiment of this invention the VHs and/or VLs of the FZD binding domain binds FZD4 or FZD5 and comprise the light chain CDRs and the heavy chain CDRs of a FZD4 or FZD5 binding antibody of Table 1, Table 2, or Table 6, and/or comprise light chain CDRs and heavy chain CDRs that are 50%, 55%, 60%, 75%, 80%, 85%, 90%, 95%, 96%, 97%, 98% or 99% identical to the CDRs of an FZD4 antibody of Table 1, Table 2 or Table 6, and still retain binding to the FZD4 or FZD5 receptor. For example, in an embodiment of the invention, the FZD binding domain may comprise a first heavy chain (CDR-H1), a second heavy chain (CDR-H2), and/or a third heavy chain (CDR-H3), wherein the VH that binds FZD may comprise CDR-H1 of SEQ ID NO: 24, SEQ ID NO: 365, or SEQ ID NO: 893, a CDR-H2 of SEQ ID NO: 51, SEQ ID NO: 61, SEQ ID NO: 462, or SEQ ID NO: 894 and/or CDR-H3 of SEQ ID NO: 79, SEQ ID NO: 90, SEQ ID NO: 484, or SEQ ID NO: 895 and a first light chain (CDR-L1), a second light chain (CDR-L2), and/or a third light chain (CDR-L3), wherein the VL that binds FZD may comprise CDR-L1 of SEQ ID NO: 1, SEQ ID NO: 3 or SEQ ID NO: 12, a CDR-L2 of SEQ ID NO: 2, SEQ ID NO: 3 or SEQ ID NO: 12 and/or a CDR-L3 of SEQ ID NO: 3, SEQ ID NO: 12, SEQ ID NO: 285, or SEQ ID NO: 896.

[0011] In an embodiment of this invention the co-receptor (LRP5/6) binding domain linked to the Fc domain of the FZD Agonist comprises one or more immunoglobulin heavy-chain variable domain (VH) fragments and/or one or more immunoglobulin light-chain variable domain (VL) fragments that bind to the Wnt co-receptor, e.g., LRP5 and/or LRP6. For example, in an embodiment of the invention, the LRP binding domain may comprise a first heavy chain (CDR-H1), a second heavy chain (CDR-H2), and/or a third heavy chain (CDR-H3), wherein the VH that binds LRP may comprise a CDR-H1 of SEQ ID NO: 527, SEQ ID NO: 528, SEQ ID NO: 536, SEQ ID NO: 716, or SEQ ID NO: 720, a CDR-H2 of SEQ ID NO: 552, SEQ ID NO: 553, or SEQ ID NO: 566, SEQ ID NO: 785, or SEQ ID NO: 791 and/or a CDR-H3 of SEQ ID NO: 584, SEQ ID NO: 585, SEQ ID NO: 586 or SEQ ID NO: 603, SEQ ID NO: 856 or SEQ ID NO: 862 CDR-H3 and a first light chain (CDR-L1), a second light chain (CDR-L2), and/or a third light chain (CDR-L3), wherein the VL that binds LRP may comprise CDR-L1 of SEQ ID NO: 1, a CDR-L2 of SEQ ID NO: 2, or SEQ ID NO: 491 and/or a CDR-L3 of SEQ ID NO: 130, SEQ ID NO: 492, SEQ ID NO: 493, SEQ ID NO: 510, SEQ ID NO: 623 or SEQ ID NO: 665.

[0012] In an embodiment of this invention, the Wnt co-receptor binding domain is bivalent and may comprise a diabody, or may comprise a Fab, a single chain variable fragment (scFv) or a single domain antibody fragments (V_{H}H) or combinations thereof for binding to the same or different epitopes on the co-receptor. In embodiments of this invention the VHs and VLs of the Wnt coreceptor binding domain comprise the light chain CDRs and/or the heavy chain CDRs of a LRP5 and/or LRP6 binding antibody of Table 3, Table 4 or Table 6, or comprise light chain CDRs and/or heavy chain CDRs that are 50%, 55%, 60%, 75%, 80%, 85%, 90%, 95%, 96%, 97%, 98% or 99% identical to the CDRs of an LRP5 and/or LRP6 antibody of Table 3, Table 4 or Table 6, and still retain binding to the LRP5 and/or LRP6 co-receptor.

[0013] In an embodiment of this invention the Wnt co-receptor binding domain linked to the Fc domain of the FZD Agonists described herein comprises a diabody, formed by two peptides each peptide comprising a heavy-chain variable domain (VH or VH domain) linked to a light-chain variable domain (VL or VL domain) wherein the VH and the VL from one peptide pair with the VL and VH of the other peptide forming the diabody. In this configuration, the binding domain has two binding sites that bind to the Wnt co-receptor, e.g., LRP5 or LRP6. The diabody may be monospecific binding the same site on the co-receptor or may be bispecific (bs) binding two different sites on the co-receptor. By using a knobs-in-holes Fc configuration, the peptides comprising the VH and VL linked to Fc regions, can be non-identical but will still pair to form a bispecific binding domain capable of binding to two different sites on the Wnt co-receptor (e.g. LRP5 or LRP6).

[0014] The peptides forming the diabodies, the V_{H}H, the scFv, and the Fabs that form the binding domains may be derived from an antibody selected for its binding to a desired target, a “source antibody”. For the FZD binding domain, the “FZD source antibody” may be an antibody that binds to one or more of the FZD receptor(s), e.g., one or more of FZD1, FZD2, FZD3, FZD4, FZD5, FZD6, FZD7, FZD8, FZD9, and FZD10, and antagonizes Wnt signaling or inhibits Wnt binding to the given FZD receptor(s). Alternatively, the FZD source antibody may be an antibody that binds to the FZD receptor(s) without antagonizing Wnt signaling or without inhibiting Wnt binding to the FZD receptor. Likewise, for the co-receptor binding domain, the “co-receptor source antibody” may be an antibody that binds to the Wnt co-receptor, e.g., LRP5/6, and antagonizes Wnt signaling or inhibits Wnt binding to the Wnt co-receptor. Alternatively, the co-receptor source antibody may be an antibody that binds to a co-receptor, e.g., LRP5/6, without antagonizing Wnt signaling or without inhibiting Wnt binding to the co-receptor.

[0015] In an embodiment of this invention the FZD binding domain of the FZD Agonist may bind specifically to a specific FZD, e.g., FZD4, with a higher affinity than to other FZDs, i.e., FZD1, FZD2, FZD3, FZD5, FZD6, FZD7, FZD8, FZD9, and FZD10, or may be pan-specific, binding to one or more other members of the FZD receptor family. In an embodiment the FZD binding domain binds specifically to one FZD with an affinity greater than 10-fold over the binding to any other Frizzled family member.

[0016] In an embodiment of this invention the FZD Agonist binds to FZD4, a “FZD4 Agonist”. The FZD4 binding domain of the FZD4 Agonist may bind specifically to FZD4, binding with a higher affinity to FZD4 over other FZDs, or may be pan-specific, binding to FZD4 and one or more other members of the FZD receptor family, e.g., Frizzled Class Receptor 1 (FZD1), Frizzled Class Receptor 2 (FZD2), Frizzled Class Receptor 3 (FZD3), Frizzled Class Receptor 5 (FZD5), Frizzled Class Receptor 6 (FZD6), Frizzled Class Receptor 7 (FZD7), Frizzled Class Receptor 8 (FZD8), Frizzled Class Receptor 9 (FZD9), or Frizzled Class Receptor 10 (FZD10). In an embodiment the FZD binding domain binds specifically to FZD4 with an affinity greater than 10-fold over any other Frizzled family member listed above.

[0017] In an embodiment of this invention the FZD Agonist binds to FZD5, a “FZD5 Agonist.” The FZD5 binding domain of the FZD5 Agonist may bind specifically to FZD5, binding with a higher affinity to FZD5 over other FZDs, or may be panspecific, binding to FZD5 and one or more other members of the FZD receptor family, e.g., FZD1, FZD2, FZD3, FZD4, FZD6, FZD7, FZD8, FZD9, or FZD10. In an embodiment the FZD binding domain binds specifically to FZD5 with an affinity greater than 10-fold over any other Frizzled family member listed above.

[0018] In an embodiment of the FZD Agonists of this invention the Wnt co-receptor binding domain is a monospecific bivalent LRP5/6 co-receptor binding domain and binds to a single epitope on the LRP5 and/or LRP6 co-receptor, e.g., an epitope of the LRP5 and/or LRP6 coreceptor that binds to Wnt1 (E1-E2 domain of LRP5 or LRP6) or binds Wnt3a (E3-E4 domain of LRP5 or LRP6). In an embodiment of this invention the co-receptor binding domain is a bispecific bivalent LRP5/6 binding domain that binds to two epitopes within the LRP5 and/or LRP6 co-receptor extracellular domain, e.g., the co-receptor binding domain interacts with the Wnt1 (E1-E2) and Wnt3 (E3-E4) epitopes of the LRP5 and/or LRP6 co-receptor. In an embodiment of this invention the co-receptor binding domain is a bispecific bivalent binding domain that binds to an extracellular domain of LRP5 and LPR6, e.g., the domain interacts with the Wnt1 (E1-E2) epitope of the LRP5 co-receptor and the Wnt1 (E1-E2) epitope of the LRP6 co-receptor LRP5, or the domain interacts with the Wnt3a (E3-E4) epitope of the LRP5 co-receptor and the Wnt3a (E3-E4) epitope of the LRP6 co-receptor or alternatively the domain interacts with a Wnt1 (E1-E2) epitope or LRP5 co-receptor and a Wnt3a (E3-E4) epitope of LPR6 co-receptor or vis versa.

[0019] Various formats of tetravalent binding antibody molecules described herein are depicted in FIG. 6. In a particular format, Diabody-Fc-Fab, an LRP5/6 binding diabody is linked to the N-terminus of an Fc domain and two Fabs are linked to the C-terminus of the Fc domain wherein the Fab is linked to the CH3 of the Fc domain via the Fab heavy chain (VH) variable domain. Alternatively, the Fab is linked to the CH3 of the Fc domain via the variable region (VL) of the light chain.

[0020] We previously reported multivalent binding molecules comprising an Fc domain, a FZD binding domain and a Wnt co-receptor (LRP5/6) binding domain on opposite termini of the Fc domain, e.g., a molecule having a FZD4 diabody linked one terminus of an Fc domain and a LRP5/6-binding diabody linked to the other terminus of the Fc domain, see PCT/IB2019/051174 inventors Angers et al. and PCT/IB2020/055463 inventors Angers et al., both incorporated in their entirety by reference.

[0021] It has been reported that Wnt-βcatenin signaling, specifically through activation of FZD4, is important for vasculature development and for adult vasculature homeostasis. More specifically, it is critical for barrier function at the blood-retina and blood-brain barriers (BRB and BBB). Defects in FZD4 signaling can lead to endothelial cell permeability defects and genetic mutations within this pathway are known to lead to vascular defects (e.g. Norrie disease, FEVR). At the blood-retina barrier, the extracellular ligand Norrin predominantly activates a FZD4-TSPAN12-LRP5 complex to regulate endothelial cell-cell interactions, barrier functions and permeability (Wang et al. (2012) Norrin/Frizzled4 signaling in retinal vascular development and blood brain barrier plasticity. Cell. 151:1332-1344). At the blood-brain barrier the secreted Wnt7a/b growth factor chiefly activates the FZD4-GPR124-LRP6 receptor complex (Chang et al., (2017). GPR124 is essential for blood-brain barrier integrity in central nervous system disease. (Nat. Med. 23:450-460). The FZD4 Agonists described herein, e.g., the configurations having a diabody binding domain for a LRP5/6 and an FZD4 binding domain comprised of two Fab fragments that bind FZD4, wherein the binding domains are on opposite termini of an Fc domain, produce a particularly stable and homogenous molecule with an unexpectedly high level of Wnt-βcatenin signaling pathway activation in endothelial cells that translates into increased barrier function and decreased vascular permeability (FIG. 11). In essence, the FZD4 Agonists described herein function as Norrin and Wnt7a/b mimetic molecules.

[0022] This invention also includes methods for using the FZD Agonists described herein. Described herein are methods to activate a Wnt signaling pathway, e.g., the Wnt/β-catenin signaling pathway, using the tetravalent binding antibody molecules of this invention, which are contemplated to promote the proximity of FZD receptors and Wnt co-receptors, e.g., one or more of FZD1, FZD2, FZD3, FZD4, FZD5, FZD6, FZD7, FZD8, FZD9, and FZD10 receptors and LRP5 and/or LRP6 co-receptors, on a cell wherein binding by the FZD Agonists to both FZD receptor(s) and the LRP5 and/or LPR6 co-receptor(s) activates the Wnt signaling pathway.

[0023] Blood-retina barrier (BRB) formation and retinal angiogenesis require βcatenin signaling induced by the ligand norrin (NDP [Norrie disease protein]), the receptor FZD4, co-receptor LRP5, and the TSPAN12 (tetraspanin 12). As such, an aspect of this invention is a method for promoting and/or maintaining retinal vasculature barrier function and angiogenesis by treating eye tissue, e.g., retinal tissue, with an effective amount of a tetravalent FZD4 Agonists of this invention.

[0024] Also, an aspect of this invention is a method for promoting, restoring and/or maintaining the BRB and BBB functions by treating the BRB or BBB vasculature with an effective amount of a tetravalent FZD4 Agonist described herein. A further aspect of this invention is a method for treating a subject having a disorder or condition characterized by defective retinal or brain angiogenesis characterized by reduced endothelial cell barrier function leading to vascular leakage by administering to such subject an effective amount of a FZD4 Agonists of this invention. A further aspect of this invention is a FZD4/LRP5 tetravalent binding antibody molecule or pharmaceutical composition for use in the treatment or prevention of a disorder or condition characterized by defective retinal or brain angiogenesis and/or characterized by reduced endothelial cell barrier function and/or vascular leakage. A further aspect of this invention is a method of treating or preventing a disorder or condition characterized by defective retinal or brain angiogenesis and/or reduced endothelial cell barrier function and/or vascular leakage comprising administering to a person in need thereof a therapeutically effective amount of a FZD4/LRP5 tetravalent binding antibody molecule described herein. A further aspect of the invention is the use of a FZD4/LRP5 tetravalent binding antibody molecule for the manufacture of a medicament for the treatment or prevention of a disorder or condition characterized by defective retinal or brain angiogenesis and/or reduced endothelial cell barrier function and/or vascular leakage. Such disorders or conditions include ocular disorders, including but are not limited to disorders of the retina or macula. Such disorders of the retina or macula include, but are not limited to diabetic retinopathy, retinipathy of prematurity, Coats' disease, FEVR, Norrie disease, macular degeneration, diabetic macular edema, and pediatric vitreoretinopathies. Additional disorders or conditions included in embodiments of this invention include but are not limited to Alzheimer's disease, epilepsy, multiple sclerosis, ischemia, and stroke.

[0025] An embodiment of this invention includes methods for producing vascularized cerebral organoids by promoting the barrier function of the vasculature network throughout the organoids, and thereby mimicking blood-brain-barrier function using an effective amount of a tetravalent FZD4 Agonist described herein.

[0026] Also, an embodiment of this invention is a method of treating a subject suffering from a gastrointestinal disorder, including a subject having inflammation of all or part of the intestines, also known as inflammatory bowel disease, by administering to such subject an effective amount of a pharmaceutical composition of this invention, e.g., a composition comprising a FZD5 Agonist. Examples of inflammatory bowel disease include, but are not limited to, Crohn's disease, and ulcerative colitis.

[0027] Also, an embodiment of this invention are methods for directing differentiation of iPS or other pluripotent stem cells (PSCs) towards various lineages by culturing these cells in the presence of an effective amount of a tetravalent binding antibody molecule of this invention.

[0028] Also described herein are methods for making the tetravalent binding antibody molecules of this invention.

[0029] The modular aspects of this invention allow for mixing and matching binding domains derived from FZD-binding antibodies and LRP5/6-binding antibodies on opposite termini of the Fc domain to generate a tetravalent binding antibody molecule that can engage a FZD-LRP5/6 co-receptor complexes to selectively activate Wnt signaling. The modularity and effectiveness of the tetravalent binding antibody molecules for activating Wnt signaling pathways described herein contrasts with the Wnt surrogates described in the prior art that consists of monovalent FZD and Wnt co-receptor binding ligands, or FZD and Wnt co-receptor binding ligands wherein the binding ligands are not attached to opposite ends of an Fc domain.

### BRIEF DESCRIPTION OF THE FIGURES

[0030] FIG. 1A and FIG. 1B. Single point ELISAs. FZD4-binding antibodies isolated from affinity matured libraries of the known FZD4-binding antibodies 5044 (FIG. 1A) and 5027 (FIG. 1B) bind to FZD4 sites that compete with their parental antibody. The reaction was stopped by adding 1M H₃PO₄ and the absorbance was measured spectrophotometrically at 450 nm in a microtiter plate reader; white=BSA; black and white stripe-Fc; gray=FZD4+blocking antibody; and black=FZD4.

[0031] FIG. 2. Epitope mapping of FZD4 antibodies. FZD4 and 5027 and 5044 have overlapping epitopes. The pan-FZD binder 5016 is a positive control showing that the antigens are functional, with the exception of “FZD4_Swap10”. Both FZD4-specific antibodies 5027 and 5044 are unable to bind to “FZD4 Swap 7” suggesting that these molecules bind to this region of the FZD ECD.

[0032] FIG. 3A. Size-exclusion chromatography (SEC). Analysis of FZD4 antibodies as compared to Trastuzumab. Protein elution was monitored using absorbance at 280 nM.

[0033] FIG. 3B. ELISA specificity. Measurements of the FZD4 antibodies determined against FZD4 and against FZD1 and FZD10, two members of the FZD family most-closely related to FZD4. The reaction was stopped by adding 1M H3PO4 and the absorbance was measured spectrophotometrically at 450 nm in a microtiter plate reader.

[0034] FIG. 4. Phage clonal ELISA of synthetic antibodies targeting LRP5. The results demonstrate that the synthetic antibodies bound to LRP5. The absorbance was measured spectrophotometrically at 450 nm in a microtiter plate reader; gray-BSA; light gray=his-Fc; dark gray=LRP5

[0035] FIGS. 5A and 5B. Phage clonal ELISA of synthetic antibodies targeting LRP6. The results demonstrate the synthetic antibodies bound to LRP6. The absorbance was measured spectrophotometrically at 450 nm in a microtiter plate reader; black=BSA; gray=Fc; light gray-LRP6-Fc.

[0036] FIG. 6. Modalities of tetravalent binding antibody molecules. Illustrated are: a diabody-Fc-diabody format having an FZD-binding monospecific diabody on the N-terminal of the Fc domain and a LPR5/6-binding bispecific diabody on the C-terminal of the Fc domain; a Diabody-Fc-scFv format having an N-terminal LPR5/6-binding bispecific diabody and two C-terminal FZD binding scFv; an IgG-diabody format having two FZD-binding Fabs forming an N-terminal binding domain and a bispecific LRP5/6 binding diabody forming the C-terminal binding domain; an IgG-scFv format having two FZD-binding Fabs forming an N-terminal binding domain and two LRP5/6 binding scFvs forming the C-terminal binding domain, and; a diabody-Fc-Fab format having a bispecific LRP5/6 binding diabody forming the N-terminal binding domain and two FZD-binding Fabs forming the C-terminal binding domain, wherein the Fabs are linked to the CH3 of the Fc domain via the Fab variable heavy region. It is specifically contemplated that in an alternate diabody-Fc-Fab format the Fabs are linked to the CH3 of the Fc domain via the Fab variable light region. The various domains of the tetravalent molecules, VL, VH, CH1, CH2, CH3, CL1 and Fc, are joined via linkers, e.g., peptide linkers. The Fc domain, is formed by the dimerization of the CH2 and CH3 domains of the Hole construct Fc region and Knob construct Fc region. The various domains of the tetravalent molecules, VL, VH, CH1, CH2, CH3, CL1 and Fc, are joined via linkers, e.g., peptide linkers.

[0037] FIG. 7. FZD4 Agonist having a Diabody-Fc-Fab format. The Diabody-Fc-Fab format having an LRP5-binding bispecific diabody forming a bivalent bispecific N-terminal LRP5-binding domain and two FZD4-binding Fabs forming a bivalent monospecific C-terminal FZD4-binding domain and an Fc region with attenuated effector functions due to amino acid mutations, e.g., N297G (NG) and D265A, (DANG) variants. The various domains of the tetravalent molecules, VL, VH, CH1, CH2, CH3, CL1 and Fc, are joined via linkers, e.g., peptide linkers.

[0038] FIG. 8. FZD4 Agonists having a Diabody-Fc-Fab format (ANT) bind FZD4 with high selectivity. FIG. 8A depicts the apparent selectivity of the FZD4 Agonists for the recombinant extracellular domain (ECD) of 9 of the 10 FZD as determined by biolayer interferometry (BLI). FIG. 8B demonstrates FZD agonists do not recognize common non-specific antigens. The FZD Agonists were tested at 100 nM for binding to a panel of antigens as described in Mouquet et al. Polyreactivity increases the apparent affinity of anti-HIV antibodies by heteroligation. Nature. 2010 September; 467(7315):591-595. DOI: 10.1038/nature09385, PMC3699875, and Jain T. et al. Biophysical properties of the clinical-stage antibody landscape. Proceedings of the National Academy of Sciences of the United States of America. 2017 January; 114(5):944-949. DOI: 10.1073/pnas. 1616408114, PMC5293111.

[0039] FIG. 9. FZD4 Agonists (ANT) having a Diabody-Fc-Fab format (having a LRP-binding bispecific diabody and two FZD4-binding Fabs) are stable and monomeric in solution. FIG. 9A presents the results of an analytical SEC analysis of FZD agonists as compared to trastuzumab IgG. FIG. 9B presents the results of differential scanning fluorimetry demonstrating that the FZD4 Agonists in the Diabody-Fc-Fab format have thermal denaturation profiles similar to that of trastuzumab, whereas a first generation diabody-Fc-diabody FZD4 modality (CM0199) is less optimal.

[0040] FIG. 10. FZD4-LRP5 specific FZD4 Agonists having the Diabody-Fc-Fab format (ANT). FZD4-LRP5 specific FZD4 Agonists in this format stimulate FZD4 in mouse endothelial cell line (bEND3.1) and lead to an increase in Axin2 (beta catenin target gene) gene transcription in a concentration-dependent manner.

[0041] FIG. 11A and FIG. 11B depicts a FZD4-LRP5 specific agonist having the diabody-fc-diabody format promotes endothelial cell barrier functions in a mechanism opposing VEGF-induced permeability. FIG. 11A depicts Immunofluoresence of ZO-1/CLDN3 and ZO-1/CLDN5 localization on bEnd.3 cell junctions. bEnd.3 cells were treated or not with 30 nM of F4L5.13 (aka CM0199) and Norrin (NDP) in the presence or absence of VEGF (100 ng/ml) for 1h. Starting from the top row and working downward: NT (non-treated) show no change in permeability; VEGF treatment of bEND3.1 cells leads to junction disassembly as seen by loss of plasma membrane staining of CLDN3, CLDN5 and ZO-1; Co-treatment of cells with VEGF and the FZD4 agonist CM0199 (F4L5.13) leads to a near-complete rescue of the effect of VEGF alone; the last row of FIG. 11A shows co-treatment of cells with VEGF and NDP and similarly leads to a near-complete rescue of the effect of VEGF alone, suggesting that the FZD4 Agonists described herein function as Norrin and Wnt7a/b mimetic molecules. FIG. 11B shows a transendothelial permeability assay quantifying the passage of FITC-dextran through a monolayer of bEnd.3 cells. Passage of FITC-dextran was measured after exposure of bEnd.3 cells to 100 ng/ml VEGF, 30 nM F4L5.13 or both or pretreated with VEGF for 1 h before treating with F4L5.13 for 1 h. Data are presented as mean±SD, n=5 independent experiments. Significance was calculated by one-way ANOVA with Bonferroni's multiple comparisons test (*P<0.05 as compared to VEGF treatment).

[0042] FIG. 12. Single point ELISA. FZD5 antibodies that bind the extracellular domain of FZD5 at a site overlapping with 2919 identified from affinity maturation libraries. New FZD5 antibodies bind FZD5 at a site overlapping with 2919 identified from affinity maturation libraries. Single point ELISAs were performed on 96-well Maxisorp plates coated with the ECDs of human FZD5 protein in the presence or absence of a saturating concentration of 2919 IgG. The absorbance was measured spectrophotometrically at 450 nm in a microtiter plate reader; white with black stripes=BSA; black with white stripes=Fc; gray=FZD5+blocking antibody; black=FZD5.

[0043] FIG. 13. Single point ELISA. demonstrates new FZD5 antibodies from 2928 affinity maturation library selectively bind FZD5. New FZD5 antibodies from 2928 affinity maturation library selectively bind FZD5. Single point ELISAs were performed on 96-well Maxisorp plates coated with the ECDs of human FZD2, FZD5, or FZD8 protein. The absorbance was measured spectrophotometrically at 450 nm in a microtiter plate reader; black with white stripes-Fc; white with black stripes-FZD2; gray=FZD8; black=FZD5.

[0044] FIG. 14. Luciferase assay. Pan-FZD/LRP6 ANT9 and FZD5-specific/LRP6 ANT59 activate Wnt signaling in cells. TOPFLASH cells were treated overnight with varying concentrations of FZD agonist or a non-targeting control molecule (CM0156) and TCF/LEF-driven luciferase expression was measured using a standard luciferase assay. Both molecules are able to activate FZD-mediated luciferase expression in a concentration-responsive manner. ANT9, which is able to bind to 7 of the 10 FZD receptor subtypes produces a higher maximal activation signal than the FZD5-specific ANT59.

[0045] FIG. 15. Original format ANT39 and inverted format ANT39i. The FZD4 Agonist ANT39 having a Diabody-Fc-Fab format and FZD4 Agonist ANT39i having an IgG-Diabody format (having two FZD-binding Fabs forming an N-terminal binding domain and a bispecific LRP5/6 binding diabody forming the C-terminal binding domain) and an Fc domain. The FZD binding domain of ANT39i comprises two Fab fragments attached to the N-terminus of the Fc domain and each Fab binds an FZD. The LRP5/6 co-receptor binding domain is attached to the C-terminus of the Fc domain and is composed of a diabody that binds two different sites on the co-receptor, e.g., a Wnt1 site (E1-E2) and a Wnt3 site (E3-E4) on LRP5/6. The Fabs may be specific for a particular FZD, e.g. FZD4, or may be pan-specific, binding to more than one FZD, e.g., to FZD4 and one or more other FZD. The Fc region may have attenuated effector functions due to amino acid mutations, e.g., N297G (NG) and D265A, (DANG) variants. The various domains of the tetravalent molecules, VL, VH, CH1, CH2, CH3, CL1 and Fc, are joined via linkers, e.g., peptide linkers.

[0046] FIG. 16A depicts FZD4 Agonist ANT39 having a Diabody-Fc-Fab format (having an LRP5-binding bispecific diabody forming a bivalent bispecific N-terminal LRP5-binding domain and two FZD4-binding Fabs forming a bivalent monospecific C-terminal FZD4-binding domain) with the Fc region having attenuated effector functions due amino acid mutations to N297G and D265A (DANG) variants or L234A, L235A, P331S (LALAPS) variants, and with the Fc region further comprising knob-in-hole heterodimerization variants Merrimack, Merchant or Merchant S:S (Merrimack CH3 mutations as described in WO2018/026942A1, Merchant CH3 mutations as described in Merchant A. M. et al Nature Biothechnology 1998 vol 16 p 677-681). FIG. 16A discloses SEQ ID NOS 886, 892, 891, 886, 892, 891, 886, 892, 891, 886, 892, and 891, respectively, in order of appearance. FIG. 16B depicts FZD4 Agonist ANT39i having an IgG-Fc-Diabody format (having two Fab fragments attached to the N-terminus of the Fc domain, each Fab binding to an FZD, and a LRP5/6 co-receptor binding domain attached to the C-terminus of the Fc domain that is composed of a diabody that binds two different sites on the co-receptor) and an Fc region with attenuated effector functions due to DANG or LALAPS variants, and Merrimack, Merchant or Merchant S:S heterodimerization variants. FIG. 16B discloses SEQ ID NOS 891, 886, 891, 886, 891, 886, 891, and 886, respectively, in order of appearance.

[0047] FIG. 17. Thermostability of ANT39 variants. FIG. 17 presents the results of differential scanning fluorimetry experiments demonstrating that the LALA variant of FZD4 agonist ANT39 (ANT39 LALA) has improved thermal stability relative to the parental ANT39 (containing DANG mutations in the Fc). Specifically, the LALA variant showed an improved thermal stability that is closer to the profile of a variant of Trastuzumab that contains the same Knob/Hole Fc mutations as the ANT.

[0048] FIG. 18. FZD4 Agonist ANT42 having a Diabody-Fc-Fab format. FZD4 Agonist ANT42 having an LRP5-binding bispecific diabody forming a bivalent bispecific N-terminal LRP5-binding domain and two FZD4-binding Fabs forming a bivalent monospecific C-terminal FZD4-binding domain with the Fc region having attenuated effector functions due amino acid mutations to N297G and D265A (DANG) variants or L234A, L235A, P331S (LALAPS) variants, and with the Fc region further comprising knob-in-hole heterodimerization variants Merrimack, Merchant or Merchant S:S (Merrimack CH3 mutations as described in WO2018/026942A1, Merchant CH3 mutations as described in Merchant A. M. et al Nature Biothechnology 1998 vol 16 p 677-681). And FZD4 Agonist ANT42i having an IgG-Fc-Diabody format (having two Fab fragments attached to the N-terminus of the Fc domain, each Fab binding to an FZD, and a LRP5/6 co-receptor binding domain attached to the C-terminus of the Fc domain that is composed of a diabody that binds two different sites on the co-receptor) and an Fc region with attenuated effector functions due to DANG or LALAPS variants, and Merrimack, Merchant or Merchant S:S heterodimerization variants. FIG. 18 discloses SEQ ID NOS 886, 892, 891, 891, 886, 886, 892, 891, 891, 886, 886, 892, 891, 891, 886, 886, 892, 891, 891, and 886, respectively, in order of appearance.

[0049] FIG. 19. Antibody modalities tested for FZD agonism. A) Diabody-Fc-Diabody, VH and VL were tested both FZD or LRP binding variable domains; B) Diabody-Fc-scFv; C) scFv-Fc-Diabody; D) scFv-Fc-scFv; E) IgG-Diabody; F) IgG-scFv; G) Diabody-Fc-Fab; H) Diabody-CH3-Diabody; I) Fab-Diabody. In FIG. 19, molecules B-F, H-I, comprise N-terminal variable domains that bind LRP and the C-terminal variable domains bind FZD. In FIG. 19, molecule G comprises a variable domain at the N-terminal that binds FZD and a variable domain at the C-terminal that binds LRP. These antibody formats marked with an * were tested using a Knobs-in-Holes Fc.

[0050] FIG. 20. Multiple antibody architectures are able to elicit potent FZD agonism. Paratopes targeting pan-FZD and LRP6 were configured in various arrangements as described in table 14. Canonical Wnt pathway stimulation by each antibody was determined on wild-type HEK cells expressing the TOPFLASH reporter in a blinded manner by two different scientists. Data are presented as mean±SD and are representative of 4 different experiments.

[0051] FIG. 21. Expression Titers of various FZD agonist modalities. Various FZD agonist modalities were expressed in HEK cells, purified via protein A chromatography, and expression titer was determined based on the absorbance at 280 nm. EC50 for FZD activation was determined on wild-type HEK cells expressing the TOPFLASH reporter in a blinded manner by two different scientists.

[0052] FIG. 22. Organoid viability Assay. Mouse small intestine organoids were grown in the presence of 1 μM LGK-974 to block endogenous Wnt secretion and treated with PBS, Wnt3a conditioned media or FLAg molecules as indicated. Left, representative images from n=3 independent experiments. Right, quantification of organoid viability via CellTiter-Glo luminescence assay. Bars represent mean±/−standard error from 3 independent experiments.

[0053] FIG. 23. Mouse colon histology. Histological appearance of the mouse colon following DSS treatment cycle (7 days 2% DSS, 3 days 0.5% DSS) with intraperitoneal injection of either control IgG or ANT59 (10 mg/kg) on days 4 and 7. (A) Images captured at 20× magnification showing overall architecture. (B) Images captured at 100× showing rescue of mucosal integrity with ANT59 treatment.

[0054] FIG. 24. (A) Body weight changes in mice throughout DSS treatment cycle (7 days 2% DSS, 3 days 0.5% DSS) with intraperitoneal injection of either control CM0156, PanFZD agonist or ANT59 (10 mg/kg) on days 4 and 7. (B) Left: Representative images of dissected colons from 6-8 mice per treatment group with centimeter scale for comparison. Right: colon length from each treatment group with bar representing mean colon length+/−S.D. and individual data points displayed. *** indicates p<0.0001 in one-way ANOVA, H2O indicates normal water (no DSS).

[0055] FIG. 25. Characterization of FZD5/LRP6 ANTs. ANTs were expressed in HEK cells, purified via protein A chromatography, and expression titer was determined based on the absorbance at 280 nm. Using biolayer interferometry, the apparent affinity (avidity) of each molecule for recombinant Fc-fused human FZD5 was determined and selectivity against other human FZDs was measured. Dose-response curves for the activation of a LEF/TCF reporter gene in FZD-knockout (1,2,4,5,7) HEK293 cells overexpressing FZD5. Cells were seeded in 96-well dishes for 24 hours, then treated as indicated for 17 hours. Reporter activation was assessed using the Dual-Luciferase Reporter Assay System (Promega). Data are presented as mean±SD for technical duplicates and representative of n=3 independent experiments.

### DETAILED DESCRIPTION OF THE INVENTION

[0056] Described herein are tetravalent binding antibody molecules comprising an Fc domain, with or without effector function, a bivalent FZD binding domain and a bivalent LRP-binding domain, wherein the binding domains are attached to opposite ends of the Fc domain. In an embodiment, the FZD binding domain is attached to the carboxy terminus of the Fc region and the LRP co-receptor binding domain is attached to the amino terminus of the Fc domain. Alternatively, the FZD binding domain is attached to the amino terminus of the Fc region and the co-receptor binding domain is attached to the carboxy terminus of the Fc domain. The binding domains may be attached directly to the Fc domain or attached to the Fc domain via a linker. The FZD binding domain may bind to one or to more than one FZD receptor, i.e., one or more of FZD1, FZD2, FZD3, FZD4, FZD5, FZD6, FZD7, FZD8, FZD9, and FZD10.

[0057] In an embodiment of the invention the FZD binding domain is bivalent and comprises a diabody or comprises a scfv, a V_{H}H fragment, or an Fab fragment or combinations thereof that bind FZD, and the co-receptor binding domain is bivalent and comprises a diabody or a V_{H}H fragment, an Fab, or a scFv or combinations thereof that bind the LRP5/6 co-receptor. In an embodiment of the invention the FZD binding domain is attached to the carboxy-terminus of the Fc domain and comprises two scfv, two V_{H}H fragments, two Fab fragments or a diabody that bind FZD, and the co-receptor binding domain attached to the amino terminus of the Fc domain comprises a diabody, two V_{H}H fragments or two scFvs that binds to the LRP5/6 co-receptor. When attached to the carboxy terminus of the Fc domain the FZD-binding Fabs are linked to the CH3 of the Fc domain via the Fab variable heavy region or variable light region. In other embodiments the FZD binding domain is attached to the amino terminus of the Fc domain and is comprised of two Fabs and the LRP5/6 co-receptor binding domain is attached to the carboxy terminus of the Fc domain and is comprised of a diabody or two scFvs that bind the co-receptor.

[0058] FIG. 6 illustrates a tetravalent binding antibody molecule of this invention in the Diabody-Fc-scFv format having a LRP5/6 co-receptor binding domain, an Fc domain, and a FZD binding domain. The Diabody-Fc-sFv comprises (i) an Fc domain, (ii) a bispecific diabody attached to the N-terminal of the Fc domain that binds two different sites on the co-receptor, e.g., a Wnt1 (E1-E2) site on LRP5/6, and a Wnt3 site (E3-E4) on LRP5/6, and (iii) a FZD binding domain comprising two FZD-binding scFv fragments attached to the carboxy terminus of the Fc domain. The scFv may be specific for a particular FZD, e.g. FZD4, or may be pan-specific, binding to more than one FZD, e.g. to FZD4 and one or more other FZD.

[0059] An embodiment of this invention is a tetravalent binding antibody molecule in a Diabody-Fc-scFv format having (i) an Fc domain, (ii) a LRP5/6 co-receptor binding domain that comprises a bispecific diabody that binds two different sites on the co-receptor, e.g., a Wnt1 (E1-E2) site on LRP5/6, and a Wnt3 site (E3-E4) on LRP5/6, wherein the diabody is attached to the amino terminus of the Fc domain and (iii) a FZD binding domain, attached to the carboxy terminus of the Fc domain comprising two scFv fragments each binding FZD. The scFv may be specific for the FZD, or may be pan-specific, binding to the FZD and one or more other FZD.

[0060] FIG. 6 also illustrates a tetravalent binding antibody molecule of this invention in the IgG-diabody format having (i) an Fc domain, (ii) a FZD binding domain that comprises of two Fab fragments attached to the N-terminus of the Fc domain, each Fab binding to an FZD, and (iii) a LRP5/6 co-receptor binding domain attached to the C-terminus of the Fc domain that is composed of a diabody that binds two different sites on the co-receptor, e.g., a Wnt1 site (E1-E2) and a Wnt3 site (E3-E4) on LRP5/6. The Fabs may be specific for a particular FZD, e.g. FZD4, or may be pan-specific, binding to more than one FZD, e.g., to FZD4 and one or more other FZD.

[0061] An embodiment of this invention is a tetravalent binding antibody molecule in an IgG-Diabody format comprising (i) an Fc domain, (ii) an N-terminal binding domain for a FZD, comprising two FZD-binding Fabs and (ii) a C-terminal binding domain for a LRP5 and/or LRP6 co-receptor, comprising a LRP5/6 coreceptor-binding diabody. This FZD Agonist in the IgG-Diabody format comprises,
[0062] (1) a first and second heavy chain monomer, wherein each heavy chain monomer comprises a single-chain polypeptide comprising from N-terminus to C-terminus:
   [0063] (a) a heavy chain variable domain (VH) that binds a FZD, linked to
   [0064] (b) a heavy chain constant region domain 1 (CH1 domain), linked to
   [0065] (c) an Fc region (or fragment thereof comprising a constant heavy chain domain 3 (CH3 domain)), linked to
   [0066] (d) a peptide comprising a VH that binds a LRP5/6 co-receptor, linked to a light chain variable domain (VL) that binds a LRP5/6 co-receptor, and
[0067] (2) a first and second light chain monomer, each light chain monomer comprising from N terminus to C terminus a VL that binds the FZD, linked to a constant light chain domain 1 (CL1 domain).

[0068] The first and second heavy chain monomers dimerize via their Fc regions, or fragments thereof. The linker between the VH and VL that bind the LRP5/6 is of a length that promotes the pairing of the VH and VL of the first heavy chain monomer with the VL and VH of the second heavy chain monomer thereby forming a LRP5/6 co-receptor binding diabody. The FZD-binding Fabs are formed by the pairing of each heavy chain monomer with a light chain monomer such that the VH that binds FZD4 and CH1 of each of the heavy chain monomer, pairs with the VL that binds FZD4 and CL1 of the light chain monomers. In this IgG-Diabody format, the Fabs form the FZD4-binding domain on the N-terminus of the Fc domain and the diabody forms the co-receptor-binding domain on the C-terminus of the Fc domain. The Fabs may be specific for one FZD, e.g., FZD4 or FZD5, or may be pan-specific, binding to more than one FZD, e.g., to FZD4 and/or FZD5, and in some cases more FZD. The Fc regions may dimerize via a knob-in-hole configuration. Methods for dimerizing peptides via a knob-in-hole configuration are described in WO2018/026942, inventors Van Dyk et al., Carter P. (2001) J. Immunol. Methods 248, 7-15; Ridgway et al. (1996) Protein Eng. 9, 617-621; Merchant, et al. (1998) Nat. Biotechnol. 16, 677-681, and; Atwell et al., (1997) J. Mol. Biol. 270, 26-35. The Fc regions may be Merrimack (knob chain: Q347M, Y349F, T350D, T366W and L368M; hole chain: S354I, E357L, T366S, L368A and Y407V), Merchant (knob chain: T366W; hole chain: T336S, L368A and Y407V) or Merchant S:S (Merchant mutations with additional S354C variant in the knob chain and Y349C in the hole chain). The Fc regions may also contain mutations that alter their effector function, e.g., the Fc region may have attenuated effector functions due to amino acid mutations, e.g., DANG variants and LALAPS variants.

[0069] Although in FIG. 6 the peptides forming the diabody in the IgG-Diabody format are linked to the C-terminal of the Fc domain via their VH domain in a VH-VL orientation (N terminal to C terminal), in some embodiments, the peptides forming the diabody are linked to the C-terminal of the Fc domain via their VL domains in a VL-VH orientation (N-terminal to C-terminal). And, although the heavy chains are depicted as comprising a VH domain and a CH1 domain linked to the N-terminal of the Fc domain and the light chains are depicted as comprising a VL domain and CL1 domain to form the Fabs, in some embodiments (Diabody-Fc-Fab in FIG. 6 and FIG. 7A) the diabodies are fused to the N-terminus of the Fc and the Fabs are fused to the C-terminus of the Fc. In order to do this, the CH3 domain of the Fc is fused directly to the heavy chain of the Fab via its VH domain (VH-CH1) or directly to the light chain via its VL domain (VL-CL) and where the light and heavy chains still associate to form the Fabs.

[0070] FIG. 6 illustrates a tetravalent binding antibody molecule in a Diabody-Fc-Fab configuration having an LRP5/6-binding bispecific bivalent diabody forming the N-terminal binding domain, and two FZD-binding Fabs forming the C-terminal binding domain. The Fabs may be specific for a particular FZD, e.g. FZD4, or may be pan-specific, binding to more than one FZD, e.g. FZD4 and one or more other FZD. See also FIG. 7A, which illustrates a tetravalent binding antibody molecule in the Diabody-Fc-Fab format having an Fc in a knob-in-hole (KiH) configuration and an LRP5-binding bispecific bivalent diabody forming the N-terminal binding domain, and two FZD4-binding Fabs forming the C-terminal binding domain. Although FIGS. 6 and 7A illustrates the Fabs linked to the CH3 of the Fc domain (at the C-terminus) via the Fab variable heavy domain (VH), it is specifically contemplated that in an alternate diabody-Fc-Fab format the Fabs are linked to the CH3 of the Fc domain via the Fab variable light domain (VL). The various domains of the tetravalent molecules, VL, VH, CH1, CH2, CH3, CL1 and Fc, are joined via linkers, e.g., peptide linkers.

[0071] Also an embodiment of this invention is a tetravalent binding antibody molecule in the Diabody-Fc-Fab format comprising (i) an Fc domain, (ii) an N-terminal binding domain comprising a diabody that binds to the co-receptor, e.g., LRP5 and/or LRP6 co-receptor and (ii) a C-terminal binding domain comprising two Fab that bind to one or more FZD, e.g., FZD4 or FZD5. This FZD Agonist in the Diabody-Fc-Fab format comprises,
[0072] (1) a first and second heavy chain monomer, wherein each heavy chain monomer comprises a single-chain polypeptide comprising, from N-terminus to C-terminus:
   [0073] (a) a peptide comprising a heavy chain variable (VH) domain that binds a LRP5/6 co-receptor and a light chain variable (VL) domain that binds a LRP5/6 co-receptor, linked to
   [0074] (b) an Fc region (or fragment thereof comprising a constant heavy chain domain 3 (CH3 domain)), linked to
   [0075] (c) a VH domain that binds a FZD, linked to
   [0076] (d) a CH1 domain, and
[0077] (2) a first and second light chain monomer each light chain monomer comprising from N-terminus to C-terminus a VL domain that binds FZD, and a constant light chain domain 1 (CL1).

[0078] The first and second heavy chain monomers dimerize via the Fc regions or fragments thereof and a bivalent LRP5/6-binding diabody is formed by the pairing of the VH domain and VL domain that bind LRP5/6 of the first heavy chain monomer with the VL domain and VH domain that bind LRP5/6 of the second heavy chain monomer. The two FZD-binding Fabs are formed by the pairing of each heavy chain monomer with a light chain monomer such that the VL that binds the FZD and the CL1 of a light chain monomer pairs with the VH that binds the FZD and the CH1 of each of the heavy chain monomers. In this Diabody-Fc-Fab format, the diabody forms the LRP5/6 co-receptor binding domain on the amino terminus of the tetravalent molecule and the two Fabs form the FZD binding domain on the C-terminus of the tetravalent binding antibody molecule. The Fc regions may dimerize via a knob-in-hole configuration.

[0079] Methods for dimerizing peptides via a knob-in-hole configuration are described in WO2018/026942, inventors Van Dyk et al., Carter P. (2001) J. Immunol. Methods 248, 7-15; Ridgway et al. (1996) Protein Eng. 9, 617-621; Merchant, et al. (1998) Nat. Biotechnol. 16, 677-681, and; Atwell et al., (1997) J. Mol. Biol. 270, 26-35. The Fc regions may be Merrimack (knob chain: Q347M, Y349F, T350D, T366W and L368M; hole chain: S354I, E357L, T366S, L368A and Y407V), Merchant (knob chain: T366W; hole chain: T336S, L368A and Y407V) or Merchant S:S (Merchant mutations with additional S354C variant in the knob chain and Y349C in the hole chain). The Fc regions may also contain mutations that alter their effector function, e.g., the Fc region may have attenuated effector functions due to amino acid mutations, e.g., DANG variants and LALAPS variants.

[0080] Although in FIGS. 6 and 7A the peptides forming the diabody in the Diabody-Fc-Fab format are linked to the Fc domain via their VL domains, thus in a VH-VL orientation (from N-terminal to C-terminal), in some embodiments the orientation can be switched such that the peptides forming the diabody are linked to the N-terminal of the Fc domain via their VH domains, thus in a VL-VH orientation (from N-terminal to C-terminal). Also, although the heavy chains in the Diabody-Fc-Fab format are depicted as comprising a VH domain and a CH1 domain, which pair with the light chain comprising a VL and CL1 domain to form the Fabs, it is also contemplated that in some embodiments the variable and constant domains are switched such that the heavy chains comprise a VL domain and a CL1 domain and the light chains comprises the VH domain and CH1 domain and the heavy and light chains still pair to form the Fabs.

[0081] In an embodiment of this invention the binding moiety of the FZD binding domain is derived from an antibody, or an antibody fragment, that binds specifically to one FZD, e.g. FZD4 or FZD5, or is pan-specific interacting with a specific FZD, e.g. FZD4 or FZD5, and one or more additional FZD receptors (an FZD source antibody), and the co-receptor binding domain comprises a binding moiety that is derived from an antibody or antibody fragment that binds to a LPR5 and/or LRP6 (a LRP5/6 coreceptor source antibody). In an embodiment of the invention the FZD-binding antibodies bind to an extracellular cysteine rich domain (CRD) of the FZD receptor. The antibody that binds FZD may be an antibody that binds the FZD receptor and antagonizes Wnt signaling or inhibits binding of a Wnt ligand to the FZD receptor. The antibody that binds FZD may be an antibody that binds the FZD receptor without antagonizing or inhibiting binding of a Wnt ligand to the FZD receptor. The antibody that binds FZD may be an antibody that binds FZD and enhances Wnt signaling. The antibody that binds the LRP5/6 co-receptor may be an antibody that binds the LRP5/6 co-receptor and antagonizes Wnt signaling or inhibits binding of a Wnt ligand to the co-receptor, or the antibody that binds the LRP5/6 co-receptor may be an antibody that binds the co-receptor without antagonizing Wnt or Norrin signaling or inhibiting binding of a Wnt or Norrin ligand to the co-receptor.

[0082] In an embodiment of this invention the LRP5/6 co-receptor binding domain binds to a single epitope on a co-receptor, e.g., an epitope that binds to the Wnt1 (E1-E2) or Wnt3 (E3-E4) interacting domain of LRP5/6. In an embodiment of this invention the LRP5/6 co-receptor binding domain binds to two epitopes within the co-receptor, e.g., a paratope that binds to the Wnt1 (E1-E2) interacting epitope and a paratope that binds to Wnt3 (E3-E4) epitope of LRP5/6. In an embodiment of this invention the multivalent binding molecule comprises a Fc domain, wherein the Fc domain is the Fc domain of an immunoglobulin or a fragment thereof comprising the CH3 domain. In an embodiment of the invention the immunoglobulin is an IgG. In an embodiment of this invention the IgG is an IgG₁.

[0083] In an embodiment of this invention the LRP5/6 binding domain comprises a diabody comprising two peptides each comprising a heavy chain variable domain (VH) that binds to LRP5/6 linked to a light-chain variable domain (VL) that binds LRP5/6 wherein the binding domain is formed by pairing of the VH and the VL from one peptide to the VL and VH of the other peptide thereby forming the LRP5/6 binding domain.

[0084] In the tetravalent binding antibody molecules of this invention both of the binding domains are bivalent and one or both of the bivalent binding domains may be bispecific for the respective FZD receptor, e.g., FZD4 or FZD5, or LRP5/6 co-receptor. For example, the binding molecule may comprise an FZD binding domain that is bivalent and monospecific (each binding site binding to the same epitope) and the LRP 5/6 binding domain is bivalent and bispecific, binding to two different epitopes (the Wnt1 (E1-E2) and Wnt3 (E3-E4) sites on the LRP5/6 ectodomain). In an embodiment of this invention both binding domains are bivalent and bispecific, each binding domain binding to two different epitopes on their respective target FZD receptor or LRP 5/6 co-receptor.

[0085] The VH and VL domains of the FZD binding domain of the tetravalent molecules of this invention may comprise the three light chain CDRs and three heavy chain CDRs of a FZD source antibody, e.g. the FZD4 or FZD5, binding antibodies of Table 1, Table 2 or Table 6, or three light chain CDRs and three heavy chain CDRs that are at least 50%, at least 55%, at least 60%, at least 75, at least. 80%, at least 85%, at least 90%, at least at least 95%, at least 96%, at least 97%, at least 98% or at least 99% identical to the CDRs of the FZD source antibody, e.g., the FZD4 antibodies of Table 1, Table 2 or Table 6, and still retain binding to the FZD or FZD5 receptor bound by the source antibody.

[0086] The VH and VL domains of the LRP5/6 co-receptor binding domain of the tetravalent molecules of this invention may comprise the three light chain CDRs and three heavy chain CDRs of an LRP5/6 co-receptor source antibody, e.g., the LRP5/6 binding antibodies of Table 3, Table 4 or Table 6, or three light chain CDRs and three heavy chain CDRs that are at least 50%, at least 55%, at least 60%, at least 75%, at least 80%, at least 85%, at least 90%, at least 95%, at least 96%, at least 97%, at least 98% or at least 99% identical to the VH and VL of the Wnt co-receptor source antibody, e.g., the LRP5/6 binding antibodies of Table 3, Table 4 or Table 6, and still bind to the LRP5/6 co-receptor.

[0087] In an embodiment of this invention the FZD binding domain of the tetravalent binding molecule of this invention binds FZD4 (an FZD4 Agonist) or FZD5 (FZD5 Agonist) or FZD4 and/or FZD5 and one or more other FZDs (a pan-FZD Agonist) and comprises

[0088] the CDR-H1, CDR-H2 and CDR-H3 and the CDR-L1, CDR-L2 and CDR-L3 of the antibodies of Table 1, Table 2 or Table 6, or CDRs that are at least 50%, at least 55%, at least 60%, at least 75%, at least 80%, at least 85%, at least 90%, at least 95%, at least 96%, at least 97%, at least 98% or at least 99% identical to the CDR-H1, CDR-H2 and CDR-H3 and CDR-L1, CDR-L2 and CDR-L3 of the antibodies of Table 1, Table 2 or Table 6, and still bind to FZD4 or FZD5, and the LRP5/6 binding domain of the FZD4 Agonist or FZD5 Agonist or pan-FZD Agonist comprises the CDR-H1, CDR-H2 and CDR-H3 and CDR-L1, CDR-L2 and CDR-L3 of the antibodies of Table 3, Table 4 or Table 6 or the CDRs are at least 50%, at least 55%, at least 60%, at least 75%, at least 80%, at least 85%, at least 90%, at least 95%, at least 96%, at least 97%, at least 98% or at least 99% identical to the CDR-H1, CDR-H2 and CDR-H3 and CDR-L1, CDR-L2 and CDR-L3 of the antibodies in Table 3, Table 4 or Table 6, and still bind to LRP5 or LRP6.

[0089] In an embodiment, the tetravalent binding antibody molecule's FZD binding domain does not comprise a diabody, scFv, or Fab comprising the three heavy chain CDRs or three light chain CDRs of the FZD4-binding antibody 5044 in combination with a Wnt co-receptor binding domain comprising a diabody, scFv, or Fab comprising the three heavy chain CDRs and three light chain CDRs of LRP6-binding antibody 2542 and/or antibody 2539. In an embodiment, the tetravalent binding molecule does not comprise a diabody, scFv, or Fab, comprising the three heavy chain CDRs and three light chain CDRs of the FZD4-binding antibody 5027 in combination with a Wnt co-receptor binding domain comprising a diabody, scFv, or Fab comprising the three heavy chain CDRs and three light chain CDRs of LRP6-binding antibody 2542 and/or antibody 2539.

[0090] Also, an embodiment of this invention are the nucleic acid molecules encoding the tetravalent binding molecules described herein. An embodiment of this invention are the nucleic acid molecules encoding the polypeptides of the tetravalent binding molecules described herein comprising the heavy chain and light chain CDRs set forth in Tables 1, 2, 3, 4, 6. Also an embodiment of this invention are the nucleic acid molecules that encode the polypeptides of the tetravalent binding molecules, e.g., FZD5 Agonists or FZD4 Agonists, of FIGS. 7A and 7B that comprise the CDRs of Table 6. Also, an embodiment of this invention are the nucleic acid molecules that encode VH and VL domains comprising respectively the heavy chain and light chain CDRs set forth in Tables 1, 2, 3, 4, and 6. The nucleic acid molecules can be inserted into a vector and expressed in an appropriate host cell and then the tetravalent binding antibody molecules may be isolated from the cells using methods well known in the art. As such, also an aspect of this invention are expression cassettes and vectors comprising the nucleic acid molecules that encode the polypeptides of the tetravalent binding molecules, e.g., FZD4 or FZD5 Agonists, described herein, the VL and VH domains, the Fabs and the diabodies comprising the CDRs of set forth in Tables 1, 2, 3, 4, and 6, and the Fc domains described herein. An aspect of this invention are the host cells expressing these expression cassettes and vectors.

[0091] As used in this invention, the term “vector” refers to a nucleic acid delivery vehicle or plasmid that can be engineered to contain a nucleic acid molecule, e.g., a nucleic acid sequence encoding the tetravalent binding antibody molecules described herein. The vector that can express protein when inserted with a polynucleotide is called an expression vector. Vectors can be inserted into the host cell by transformation, transduction, or transfection, so that the carried genetic substances can be expressed in the host cell. Vectors are well known to the technical personnel in the field, including but not limited to: plasmid; phagemid; cosmid; artificial chromosome such as yeast artificial chromosome (YAC), bacterial artificial chromosome (BAC), or P1 derived artificial chromosome (PAC); phage such as λphage or M13 phage and animal viruses etc. Animal viruses may include but not limited to, reverse transcriptase virus (including lentivirus), adenovirus, adeno-associated virus, herpes virus (e. g. herpes simplex virus), chicken pox virus, baculovirus, papilloma virus, and papova virus (such as SV40). A vector can contain multiple components that control expression of the tetravalent binding antibody molecules described herein, including but not limited to, promoters, e.g., viral or eukaryotic promoters, e.g., a CMV promoter, signal peptides, e.g., TRYP2 signal peptide, transcription initiation factor, enhancer, selection element, and reporter gene. In addition, the vector may also contain replication initiation site(s).

[0092] As used in this invention, the term “host cell” refers to cells that can import expression cassettes and vectors, including but not limited to, prokaryotic cells such as Escherichia coli and Bacillus subtilis, fungal cells such as yeast and Aspergillus, insect cells such as S2 drosophila cells and Sf9, or animal cells, including human cells, e.g., fibroblast cells, CHO cells, COS cells, NSO cells, HeLa cells, BHK cells, or HEK293 cells.

[0093] An embodiment of this invention is a pharmaceutical composition comprising a FZD Agonist or a nucleic acid molecule, expression cassette and vector encoding a FZD Agonist described herein and a pharmaceutically acceptable carrier, diluent or excipient. The pharmaceutical composition may further comprise an additional agent, e.g., a second therapeutic antibody e.g. an anti-VEGF antibody (aflibercept, ranibizumab and bevacizumab), a growth factor, e.g., VEGF, or an agent that activates a Wnt pathway, e.g., the small molecule CHIR99021, a Norrin or R-Spondin, or a nucleic acid molecule, expression cassettes and vectors that encode the agent. The pharmaceutical composition may consist of or consist essentially of a FZD Agonist, or a nucleic acid molecule, an expression cassette or vector encoding an FZD Agonist described herein, and a pharmaceutically acceptable diluent, carrier or excipient. Suitable carriers, diluents and excipients, and their formulations are described in Remington: The Science and Practice of Pharmacy (19th ed.) ed. A. R. Gennaro, Mack Publishing Company, Easton, Pa. 1995. Typically, an appropriate amount of a pharmaceutically-acceptable salt is used in the formulation to render the formulation isotonic. Examples of the pharmaceutically-acceptable carrier include, but are not limited to, saline, Ringer's solution and dextrose solution. The pH of the solution may be e.g., from about 5 to about 8, from about 5 to 7.5 or from about 6 to 7. Further carriers include sustained release preparations such as semipermeable matrices of solid hydrophobic polymers containing the agonist, which matrices are in the form of shaped articles, e.g., films, liposomes or microparticles. It will be apparent to those persons skilled in the art that certain carriers may be more preferable depending upon, for instance, the route of administration and concentration of the FZD Agonists being administered.

[0094] This invention also includes methods for using the FZD Agonists, described herein. An embodiment of this invention is a method for activating a Wnt signaling pathway in a cell, comprising contacting a cell having an FZD receptor and a LRP5/6 co-receptor, with a tetravalent binding antibody molecule of this invention that binds the FZD, e.g., FZD4, and the LRP5/6 in an amount effective to activate Wnt signaling. It has been reported that the Norrin-FZD4 pathway plays a role in retinal angiogenesis (see Wang et al. Cell. 2012; 151(6):1332-1344.; Braunger B M, Tamm E R. Adv Exp Med Biol. 2012; 723:679-683; Ohlmann A, Tamm E R. Prog Retin Eye Res. 2012; 31(3):243-257 and; Ye et al. Trends Mol Med. 2010; 16(9):417-425). Signaling through Norrin-FZD4 pathway is necessary for development and maintenance of retinal vasculature. Mutations affecting genes of this pathway may result in several vitreoretinopathies, such as Norrie Disease, Familial Exudative Vitreoretinopathy (FEVR), and Pseudoglioma and Osteoporosis Syndrome. Additionally, Retinopathy of Prematurity (ROP) has been associated with mutations in this Norrin-FZD4 pathway, and Wnt-pathway mutations have been reported in Coats Disease and Persistent Fetal Vasculature (PFV). FZD4 signaling activated by Norrin and/or WNT7A/B pathway is also associated with CNS blood brain barrier development and homeostasis. Genetic ablation of the Norrin, FZD4, LRP5, LRP6 and the co-receptor Tetraspanin-12 (Tspan-12) result in defective angiogenesis and barrier disruption in the retinal and/or cerebellar vessels (Cho et al. (2017) Neuron 95, 1056-1073; Zhou et al., (2014) J Clin Invest 124:3825-3846). Thus, a functional Wnt signaling system plays a key fundamental role in the development of a sufficient vascular and neural network in the eye and retina to support vision and in the CNS to support BBB development and homeostasis.

[0095] An aspect of this invention is a method for promoting and/or maintaining retinal vasculature by treating eye tissue, e.g., retinal tissue, with an effective amount of a pharmaceutical compositions comprising the tetravalent antibody molecules of this invention, e.g., tetravalent antibody molecules that binds FZD4 and LRP5/6, a FZD4 Agonists, having the structures illustrated in FIG. 6 through local or systemic administration. Also, an aspect of this invention is a method for promoting and/or maintaining BBB vasculature by treating a subject in need thereof with an effective amount of a pharmaceutical compositions of this invention, e.g., a composition comprising a FZD4 Agonists having the structures depicted in FIG. 6. The BBB is initiated during development and its integrity remains vital for homeostasis and neural protection throughout life. A subject in need thereof includes a subject having a neurological condition associated with BBB dysfunction, e.g., neurodegenerative diseases such as Alzheimer's disease, as well epilepsy, multiple sclerosis, and stroke.

[0096] A further aspect of this invention is a method for treating a subject having a disorder characterized by vascular leakage, particularly retinal vascular leakage, and/or endothelial cell leakage, and disorders characterized by reduced retinal or brain endothelial cell barrier functions or a compromised BBB or BRB, e.g., diabetic retinopathy, retinipathy of prematurity, Coat's disease, FEVR, Norrie disease, macular degeneration, diabetic macular edema, and pediatric vitreoretinopathies, by administering to such subject an effective amount of a pharmaceutical compositions of this invention, e.g., a composition comprising a FZD4 Agonist having the structures depicted in FIG. 6. An effective amount of such composition is an amount sufficient, e.g., to increase or restore endothelial cell barrier functions and thereby reducing vascular leakage in such subject. The subject may be a fetus. The FZD4 Agonists of this invention particularly the FZD4 Agonist in the diabody-Fc-Fab format comprising two Fab fragments forming the FZD4 binding domain on the carboxy terminal of the Fc receptor and a binding domain for LRP5 and/or LRP6 composed of a diabody on the amino terminal of the Fc domain, e.g., as illustrated in FIG. 6, activates FZD4 and β-catenin signaling in endothelial cells, promotes barrier functions and thereby reduces endothelial cell permeability and significantly enhance angiogenesis. In particular, treatment of endothelial cells, in vivo, ex vivo or in vitro, with these FZD4 Agonists, preferably those with the diabody-Fc-Fab format, enhance the development and maintenance of retinal vasculature and/or the BRB and the BBB far more effectively than other molecules that do not have this structure.

[0097] A further aspect of the invention is a method for treating a subject having inflammation of all or part of the intestines, also known as inflammatory bowel disease, by administering to such subject an effective amount of a pharmaceutical composition of this invention, e.g., a composition comprising a FZD5 Agonist. Examples of inflammatory bowel disease include, but are not limited to, Crohn's disease, and ulcerative colitis. An effective amount of such composition is an amount sufficient to reduce, ameliorate, eliminate, or treat the inflammation. A subject in need thereof includes a subject having inflammation of the mucosal of the gastrointestinal tract. The methods disclosed herein may be practiced to reduce inflammation (e.g., inflammation associated with IBD or in a tissue affected by IBD, such as gastrointestinal tract tissue, e.g., small intestine, large intestine, or colon), activate WNT signaling, or reduce any of the histological symptoms of IBD (e.g., those disclosed herein).

[0098] The FZD Agonists of the present invention may be administered systemically or locally, e.g., by injection (e.g. subcutaneous, intravenous, intraperitoneal, intrathecal, intraocular, intravitreal, etc.), implantation, topically, or orally. Depending on the route of administration, the FZD Agonists may be coated in a material to protect the agonists from conditions that may inactivate the agonists. The tetravalent binding antibody molecules described herein may be dissolved or suspended in a pharmaceutically acceptable, preferably aqueous carrier. In addition, the composition comprising the FZD Agonists can contain excipients, such as buffers, binding agents, blasting agents, diluents, flavors, lubricants, etc. An extensive listing of excipients that can be used in such a composition, can be, for example, taken from A. Kibbe, Handbook of Pharmaceutical Excipients (Kibbe, 2000). The tetravalent binding antibody molecules can also be administered together with immune stimulating substances, such as cytokines.

[0099] An embodiment of this invention includes a method for deriving cerebral organoids with a vascular network exhibiting barrier functions by using the tetravalent antibody molecules described herein. The tetravalent binding antibody molecules described herein that activate FZD4 signaling are envisioned to promote barrier function within endothelial cells cultured with cerebral organoids and thereby promoting angiogenesis.

[0100] An embodiment of this invention includes a method for directed differentiation of multipotent or pluripotent stem cells (PSC) or induced pluripotent stem (iPS) cells comprising culturing the cells under conditions suitable for directed differentiation wherein said culturing conditions further comprise an effective amount of a tetravalent binding antibody molecule described herein. Studies in mouse and human PSCs have identified specific approaches to the addition of growth factors, including Wnt, which can induce PSC differentiation into different lineages. Methods for directed differentiation of PSCs comprising the activation of Wnt signaling are known in the art see e.g. Lam et al. (2014) Semin Nephol 34(4); 445-461; Yucer et al. (Sep. 6, 2017) Scientific Reports 7, Article number 10741. It is contemplated that the FZD Agonists, e.g. FZD4 Agonists, described herein can be used in an amount sufficient to effect activation of Wnt signaling pathways to direct differentiation of the PSCs to certain mesodermal lineages such as cardiomyocytes (cite Yoon et al. FZD4 Marks Lateral Plate Mesoderm and Signals with NORRIN to Increase Cardiomyocyte Induction from Pluripotent Stem Cell-Derived Cardiac Progenitors. Stem Cell Reports. 2018 January; 10(1):87-100. DOI: 10.1016/j.stemcr.2017.11.008.PMID: 29249665).

[0101] An embodiment of this invention is a method for enhancing tissue regeneration in a subject in need thereof by activating Wnt signaling in such subject by administering to the subject in need thereof an effective amount of a FZD Agonists described herein.

[0102] An embodiment of this invention includes a method for promoting endothelial cell barrier functions in eye tissue, e.g., retinal tissue, in a subject in need thereof, by administering an effective amount of a tetravalent binding molecule of this invention that binds FZD4 and LPR5/6, an FZD4 Agonist. In a particular embodiment the FZD4 Agonist of this invention that binds to FZD4 and a binding domain that binds to LRP5 or/and LRP6 has a diabody-Fc-Fab structure depicted in FIGS. 6 and 7. In an embodiment of this invention the FZD4 Agonists for enhancing retinal angiogenesis comprise the light chain CDRs, i.e., CDR-L1, CDR-L2, and CDR-L3 and heavy chain CDRs, i.e., CDR-H1, CDR-H2 and CDR-H3 of the FZD4-binding antibodies set forth in Tables 1, 2, and 6 and the LRP5/6-binding antibodies set forth in Tables 3, 4, and 6.

[0103] A subject as used herein may be any animal (e.g., a mammal), including, but not limited to, humans, non-human primates, horses, cows, dogs, cats, rodents, and the like. The subject may be a fetus. Typically, the subject is human.

[0104] Effective dosages and schedules for administering the FZD Agonists and nucleic acids that encode them described herein may be determined empirically, and making such determinations is within the skill in the art. Those skilled in the art will understand that the dosage of such FZD Agonists that must be administered will vary depending on, for example, the subject who will receive the antibody, the route of administration, the particular type of FZD Agonists used and other drugs being administered. Guidance in selecting appropriate doses for FZD Agonists is found in the literature on therapeutic uses of antibodies, e.g., Handbook of Monoclonal Antibodies, Ferrone, eds., Noges Publications, Park Ridge, N.J., (1985) ch. 22 and pp. 303-357; Smith, Antibodies in Human Diagnosis and Therapy, Haber, eds., Raven Press, New York (1977) pp. 365-389. The dosage ranges for the administration of the compositions are those large enough to produce the desired effect, e.g., promote endothelial cell barrier functions, vascular homeostasis, or enhance Wnt signaling. The dosage should not be so large as to cause adverse side effects, such as unwanted cross-reactions, anaphylactic reactions, and the like. Generally, the dosage will vary with the age, condition, gender and the extent of the disease or disorder, in the patient and can be determined by one of skill in the art. The dosage can be adjusted by the individual physician in the event of any contraindications. Dosage can vary, and can be administered in one or more dose administrations daily, for one or several days. While individual needs vary, determination of optimal ranges of effective amounts of the vector is within the skill of the art.

[0105] Also, an aspect of this invention is a method for making the tetravalent binding antibody molecules described herein. The amino acid sequences of FZD receptors, e.g. FZD4, and the Wnt co-receptors LRP5/6, and nucleotide sequences encoding FZD receptors and the Wnt co-receptors LRP5/6, as well as antibodies and libraries of antibodies that bind FZD, e.g., FZD4, or the Wnt co-receptors LRP5/6, are readily available or can be generated using methods well known in the art (see e.g., U.S. publication no. 2015/0232554, inventors Gurney et al. and US publication no. 2016/0194394, inventors Sidhu et al. and US20190040144, inventors Pan et al.; U.S. publication no. 2017/0166636, inventors Wu et al.; U.S. publication no. 2016/0208018, inventors Chen et al.; U.S. publication no. 2016/0053022, inventors Macheda et al.; U.S. publication no. 2015/031293, inventors Damelin et al.). And a variety of methods are known in the art for generating and screening such phage display libraries for antibodies, and antibody fragments, scFv, Fab, VL, and VH possessing the desired binding characteristics. Such methods are reviewed, e.g., in Hoogenboom et al. in Methods in Molecular Biology 178:1-37 (O'Brien et al., ed., Human Press, Totowa, N.J., 2001) and further described, e.g., in the McCafferty et al., Nature 348:552-554; Clackson et al., Nature 352:624-628(1991); Marks et al., J. Mol. Biol. 222:581-597(1992); Marks and Bradbury, in Methods in Molecular Biology 248:161-175 (Lo, ed., Human Press, Totowa, N.J., 2003); Sidhu et al., J. Mol. Biol. 338(2):299-310(2004); Lee et al., J. Mol. Biol. 340(5):1073-1093 (2004); Fellouse, Proc. Natl. Acad. Sci. USA 101(34):12467-12472(2004); and Lee et al., J. Immunol. Methods 284(1-2):119-132(2004), all incorporated herein by reference. In certain phage display methods, repertoires of VH and VL genes are separately cloned by polymerase chain reaction (PCR) and recombined randomly in phage libraries, which can then be screened for antigen-binding phage as described in Winter et al., Ann. Rev. Immunol., 12:433-455 (1994). Phage typically display antibody fragments, either as single-chain Fv (scFv) fragments or as Fab fragments. Libraries from immunized sources provide high-affinity antibodies to the immunogen without the requirement of constructing hybridomas. Alternatively, the naive repertoire can be cloned (e.g., from human) to provide a single source of antibodies to a wide range of non-self and also self antigens without any immunization as described by Griffiths et al., EMBO J, 12:725-734 (1993). Finally, naive libraries can also be made synthetically by cloning unrearranged V-gene segments from stem cells, and using PCR primers containing random sequence to encode the highly variable CDR3 regions and to accomplish rearrangement in vitro, as described by Hoogenboom and Winter, J. Mol. Biol., 227:381-388 (1992). Patent publications describing human antibody phage libraries include, for example: U.S. Pat. No. 5,750,373, and US Patent Publication Nos. 2005/0079574, 2005/0119455, 2005/0266000, 2007/0117126, 2007/0160598, 2007/0237764, 2007/0292936, and 2009/0002360, all incorporated herein by reference. Antibodies or antibody fragments isolated from human antibody libraries are considered human antibodies or human antibody fragments herein.

[0106] In an embodiment of this invention a tetravalent binding antibody molecule in a diabody-Fc-scFv format comprising a LRP5/6 coreceptor binding domain comprising LRP5/6-binding diabody and an FZD-binding domain comprising two FZD-binding scFvs is generated by,
[0107] (a) selecting an Fc domain having a C-terminus and an N-terminus
[0108] (b) identifying an antibody that binds to an FZD receptor (the “FZD source antibody”), and
[0109] (c) identifying an antibody that binds LRP 5/6 co-receptor (“coreceptor source antibody” or “LRP 5/6 source antibody”),
[0110] (d) generating a nucleic acid molecule comprising a nucleotide sequence that encodes a polypeptide monomer comprising
   [0111] (i) a peptide comprising a VL domain linked to a VH domain, the domains comprising the heavy chain and/or light chain CDRs of the antibody of step b that bind the FZD receptor, or comprising heavy chain and/or light chain CDRs derived from the antibody of step b that still bind the FZD, linked to
   [0112] (ii) an Fc domain of step a, linked to
   [0113] (iii) a peptide comprising VL domain linked to a VH domain comprising the light chain and/or heavy chain CDRs of the antibody of step c, or comprising CDRs derived from the antibody of step c and that still bind LRP 5/6 co-receptor,
[0114] (e) expressing the nucleic acid molecule of step d to produce the polypeptide monomer and then dimerizing the polypeptide,

[0115] wherein the VH and VL that bind the FZD of each monomer form a scFv that binds FZD, and the VH and VL domains that bind the LRP 5/6 coreceptor of one monomer bind the VL and VH that binds the Wnt coreceptor of another monomer forming a LRP5/6 co-receptor-binding diabody, and

[0116] wherein the polypeptide monomer dimerizes via the Fc regions to form a tetravalent binding antibody molecule comprising an Fc domain, a FZD-binding domain comprised of two FZD-binding scFvs, and a LRP5/6 coreceptor binding domain comprised of the diabody, wherein the FZD binding domain and the LRP5/6 co-receptor binding domain are on opposite termini of Fc domain. It is contemplated that the peptides comprising the VL and VH domains that bind the FZD or the LRP may be linked to either the N or C terminus of the Fc domain via the VL domain or the VH domain provided the FZD binding domain and LRP binding domain are on opposite termini of the Fc domain. The FZD may be one or more of FZD1, FZD2, FZD3, FZD4, FZD5, FZD6, FZD7, FZD8, FZD9, and FZD10.

[0117] In an embodiment of this invention, the tetravalent binding antibody molecule has two FZD-binding Fabs, e.g., FZD4-binding Fabs, linked to one terminus of the Fc domain and two LRP5/6-binding scFvs or a LRP5/6-binding diabody linked to the other terminus of the Fc domain and is generated by,
[0118] (a) identifying the light chain complementary determining regions (CDR-L1, CDR-L2, and CDR-L3) and/or heavy chains complementary determining regions (CDR-H1, CDR-H2, and CDR-H3) of an antibody that binds to the FZD, e.g., FZD4 or FZD5, (the “FZD source antibody”) and
[0119] (b) identifying the CDR-L1, CDR-L2, and CDR-L3 and/or the CDR-H1, CDR-H2, and CDR-H3 of one or more antibodies that binds to LRP5 or LRP6, (the “LRP5/6 source antibody”),
[0120] (c) generating a nucleic acid molecule encoding a “heavy chain” polypeptide comprising
   [0121] (i) a peptide comprising an immunoglobulin constant heavy chain region 1 (CH1 domain) linked to a VH domain comprising the CDR-H1, H2 and H3 of the antibody of step a), or a CDR-H1, CDR-H2 and CDR-H3 derived from the antibody of step a) that still binds the FZD4, linked to
   [0122] (ii) an Fc region, linked to
   [0123] (iii) a peptide comprising a VL domain comprising the CDR-L1, CDR-L2 and CDR-L3 of an antibody of step b) linked to a VH domain comprising the CDR-H1, CDR-H2 and CDR-H3 of an antibody of step b), or CDR-H1, CDR-H2 and CDR-H3 derived from the antibody of step b) that binds to LRP5 or LRP6,
[0124] (d) generating a nucleic acid molecule comprising a nucleic acid sequence that encodes a “light chain” polypeptide comprising an immunoglobulin constant light region 1 (CL1) linked to a VL domain wherein the VL domain comprises the FZD light chain CDR-L1, CDR-L2 and CDR-L3 of the antibody in step a),
[0125] (e) expressing the nucleic acid molecules of (c) and (d) to produce the heavy chain polypeptide and the light chain polypeptide,

[0126] wherein two heavy chain polypeptides dimerize via their Fc regions and the VH that binds the FZD and CH1 domains of the heavy chain polypeptide pair with the VL that binds the FZD and CL1 domains of the light chain polypeptide forming two FZD Fabs and

[0127] wherein the VH and VL that binds LRP5/6 in each heavy chain polypeptide pair to form an scFv that binds LRP5/6, or the VH and VL that bind LRP5/6 of one heavy chain polypeptide in the dimer pair with the VL and VH that bind the LRP5/6 of the other heavy chain polypeptide in the dimer to form a diabody, thereby forming the tetravalent binding antibody molecule comprising an Fc domain, two FZD Fabs linked to either the N or C terminus of the Fc domain and two LRP5/6-binding scFvs or a LRP5/6-binding diabody linked to the other terminus of the Fc domain.

[0128] The FZD source antibody may be an antibody that binds specifically to one FZD, e.g., FZD4, or is a pan-specific antibody binding FZD, e.g., FZD4 or FZD5, and one or more other FZD receptors and antagonizes Wnt signaling or inhibits Wnt binding to the receptor. Alternatively, the FZD source antibody may be an antibody that binds specifically to one FZD, e.g., FZD4 or FZD5, or is a pan-specific antibody binding one FZD, e.g., FZD4 or FZD5, and one or more other FZD receptors without antagonizing Wnt signaling or inhibiting Wnt binding to the receptor. The LRP source antibody may be an antibody that binds specifically to LRP5/6, or is panspecific binding to LRP5/6 and to one or more of the Wnt co-receptors, and antagonizes Wnt signaling or inhibits Wnt binding to the co-receptor. Alternatively, the LRP5/6 source antibody may be an antibody that binds to the LRP 5/6 co-receptor, or is panspecific binding to LRP5/6 and to one or more of the Wnt co-receptors, without antagonizing Wnt signaling or inhibiting Wnt binding to the LRP5/6 co-receptor.

[0129] The FZD source antibody may be an antibody fragment that binds the FZD receptor, e.g., an Fab, a VL or VH. The light chain and heavy chain CDRs, the VH and/or VL in the FZD binding domain of the FZD Agonists may be identical to the CDRs, the VH and/or VL of the FZD source antibody or may be at least 50%, at least 55%, at least 60%, at least 75%, at least 80%, at least 85%, at least 90%, at least 95%, at least 96%, at least 97%, at least 98% or at least 99% identical to the CDRs, VH or VL of the source antibody and still retain binding to the FZD receptor. The CDRs, the VH and/or VL in the FZD binding domain of the FZD Agonists may be identical to the CDRs, the VH and/or VL of a FZD4-binding or FZD5-binding antibody of Table 1, Table 2 or Table 6, or may be at least 50%, at least 55%, at least 60%, 75%, at least 80%, at least 85%, at least 90%, at least 95%, at least 96%, at least 97%, at least 98% or at least 99% identical to the CDRs, VH or VL of a FZD4-binding or FZD5-binding antibody of Table 1 or Table 2 or Table 6 and still retain binding to the FZD receptor.

[0130] Likewise, the Wnt co-receptor source antibody may be an antibody fragment, e.g. an Fab, a VL or a VH, that binds the LRP co-receptor, e.g., LRP5/6. The light chain CDRs and heavy chain CDRs, the VH and/or VL in the Wnt co-receptor binding domain of the FZD4 Agonists may be identical to the CDRs, the VH and/or VL of the Wnt co-receptor source antibody or may be at least at least 50%, at least 55%, at least 60%, at least 75%, at least 80%, at least 85%, at least 90%, at least 95%, at least 96%, at least 97%, at least 98% or at least 99% identical to the CDRs, VHs or VLs of the source antibody and still retain binding to the LRP co-receptor. The light chain CDRs and heavy chain CDRs, the VH and/or VL in the LRP5/6 binding domain of the FZD Agonists may be identical to the light chain CDRs and heavy chain CDRs, the VH and/or VL of a LRP-binding antibody of Table 3, Table 4 or Table 6 or may be at least at least 50%, at least 55%, at least 60%, at least 75%, at least 80%, at least 85%, at least 90%, at least 95%, at least 96%, at least 97%, at least 98% or at least 99% identical to the light chain CDRs and heavy chain CDRs, VH or VL of a LRP-binding antibody of Table 3, Table 4 or Table 6 and still retain binding to the LRP co-receptor.

[0131] In an embodiment of this invention, two polypeptides of the tetravalent binding antibody molecule dimerize via knob-in-hole configuration of their Fc sequences. The tetravalent binding antibody molecules of this invention may be generated by dimerizing two polypeptides in a “knob-in-hole” configuration. The knob-in-hole configuration increases the modularity of this invention by facilitating the association of peptides that comprise binding moieties that bind different epitopes on a FZD receptor or LRP5/6 co-receptor or to epitopes on different members of the FZD receptor or co-receptor family, see e.g., FIG. 6. Methods for engineering Fc molecules via the knobs into holes design are well known in the art, see e.g., WO2018/026942, inventors Van Dyk et al., Carter P. (2001) J. Immunol. Methods 248, 7-15; Ridgway et al. (1996) Protein Eng. 9, 617-621; Merchant, et al. (1998) Nat. Biotechnol. 16, 677-681, and; Atwell et al., (1997) J. Mol. Biol. 270, 26-35.

[0132] Without wishing to be bound by theory, it is contemplated that the tetravalent binding antibody molecules of this invention facilitate the interaction of a FZD receptor and an LRP5/6 co-receptor on a cell by promoting their proximity and stabilizing conformations of the receptor proteins that are favorable for activating Wnt signaling pathways. Another embodiment of this invention is a method for facilitating the interaction of a FZD receptor and an LRP5/6 co-receptor on a cell thereby activating a Wnt signaling pathway in the cell comprising, a) selecting an Fc domain, or fragment thereof comprising a CH3 domain, having a C-terminus and an N-terminus b) linking a first bivalent binding domain, which binds the FZD receptor, on one terminus of the Fc domain and linking a second bivalent binding domain, which binds to the Wnt co-receptor, on the other terminus of the Fc domain thereby forming a tetravalent binding antibody molecule; c) contacting said tetravalent binding antibody molecule with the cell expressing said FZD receptor and Wnt co-receptor under conditions wherein the FZD receptor and co-receptor both bind to the tetravalent binding antibody molecule thereby activating the Wnt signaling pathway. The Wnt co-receptor binding domain and FZD binding domain are bivalent and each comprise a VL and/or a VH, or V_{H}H domain and one or both of the binding domains may be monospecific. In an embodiment of the invention one or both the Wnt co-receptor binding domain and FZD binding domain are bispecific. In an embodiment of the invention the Wnt co-receptor binding domain is bivalent and bispecific. The FZD binding domain may comprise a scFV that binds FZD, a V_{H}H that binds FZD, or an Fab that binds FZD, or combinations thereof, or a diabody that binds FZD. The Wnt co-receptor binding domain may comprise a scFV that binds the LRP5/6 co-receptor, a V_{H}H that binds LRP5/6, an Fab that binds the LRP5/6 co-receptor, or combinations thereof, or a diabody that binds the LRP5/6 co-receptor. In an embodiment of the invention the FZD binding domain comprises two FZD-binding Fabs and the Wnt co-receptor binding domain comprises a bispecific bivalent diabody that binds LRP5/6 on two different epitopes.

[0133] The tetravalent binding antibody molecules of this invention initiate the Wnt signaling pathway(s) that are stimulated by the FZD-co-receptor complexes, e.g., the β-catenin pathway stimulated by FZD-LRP5/6 complexes. Wnt ligands function by promoting the clustering of FZD receptors with co-receptors. Without wishing to be bound by theory, it is contemplated that the FZD Agonists described herein bind both the FZD receptor and its LRP5/6 co-receptor thereby forming a complex that mimics the binding of a Wnt molecule to the FZD receptor and LRP 5/6 co-receptor(s), which in turn activates Wnt signaling pathways, the Wnt β-catenin pathway.

[0134] An embodiment of this invention is a method for activating a Wnt signaling pathway comprising contacting a cell expressing a FZD receptor and its LRP5/6 co-receptor with an effective amount of the FZD Agonists of this invention comprising a FZD binding domain and a LRP5/6 co-receptor binding domain.

[0135] The FZD Agonists of this invention may be made recombinantly, e.g., by Gibson assembly (see Gibson et al. (2009) Nature Methods 6 (5): 343-345 and Gibson DG. (2011) Methods in Enzymology 498:349-361), or the molecules may be made synthetically e.g., using commercial synthetic apparatuses, for example, automated synthesizers by Applied Biosystems, Inc., Beckman, etc. By using synthesizers, naturally occurring amino acids may be substituted with unnatural amino acids. The particular sequence and the manner of preparation will be determined by convenience, economics, purity required, and the like. If desired, various groups may be introduced into the peptide during synthesis or during expression, which allow for linking to other molecules or to a surface.

[0136] The binding domains of the FZD Agonists may be linked to the Fc domain via a linker. In some embodiments, adjacent VH and VL domains may be attached to each other via a peptide linker. In some embodiments adjacent constant domains and variable domains are attached via a peptide linker. The linker may be, e.g. a polypeptide linker, or a non-peptidic linker. In some embodiments the constant domains and variable domains of the FZD Agonists are attached to the Fc domain via a peptide linker. Suitable linkers are well known in the art, e.g., an XTEN linker (see WO2013120683, inventors Schellenberger et al.) In some embodiments, the peptide linker comprises at least 1, 2, 3, 4, 5, 6, 7, 8, 9, 10, 11, 12, 13, 14, 15, 16, 17, 18, 19, 20, 21, 22, 23, 24, 25, 26, 27, 28, 29, 30, 31, 32, 33, 34, 35, 36, 37, 38, 39, 40, 41, 42, 43, 44, 45, 46, 47, 48, 49, 50, 51, 52, 53, 54, 55, 56, 57, 58, 59, 60, 61, 62, 63, 64, 65, 66, 67, 68, 69, 70, 71, 72, 73, 74, 75, 76, 77, 78, 79, 80, 81, 82, 83, 84, 85, 86, 87, 88, 89, 90, 91, 92, 93, 94, 95, 96, 97, 98, 99 or at least 100 amino acids. In some embodiments, the peptide linker is between 1 to 100, 5 to 75, 1 to 50, 5 to 50, 1 to 30, 1 to 25, 5 to 25, 5 to 20, 5 to 15, 5 to 10, 1-10 or 1-5 amino acids in length. The modular aspects of this invention allow for mixing and matching of binding domains derived from antibodies that bind to FZD receptor or antibodies that bind LRP5/6 co-receptor on the opposite termini of the Fc domain to generate a tetravalent binding antibody molecule that can engage FZD receptor-LRP5/6 co-receptor complexes to activate Wnt signaling.

[0137] The Fc domain of the FZD Agonists, with or without the linker, is of a length and flexibility that allows for the tetravalent binding antibody molecule of this invention to bind both the FZD receptor and its LRP5/6 co-receptor thereby stabilizing receptor conformations that are compatible with activation of downstream Wnt signaling pathways. In an embodiment of this invention the Fc domain, or fragment thereof comprising the CH3 domain, with or without the linker is greater than 100 amino acids spanning up to 300 Å, greater than 125 amino acids spanning up to 375 Å, greater than 150 amino acids spanning up to 450 Å, greater than 175 amino acids spanning up to 525 Å, or greater than 300 amino acids spanning up to 900 Å. Preferably the Fc domain is about 200 amino acids to about 300 amino acids in length.

[0138] As used herein and in the appended claims, the singular forms “a”, “an”, and “the” include plural referents unless the context clearly dictates otherwise. Thus, for example, reference to “a cell” includes a plurality of such cells and reference to “the peptide” includes reference to one or more peptides and equivalents thereof, e.g. polypeptides, known to those skilled in the art, and so forth.

[0139] An “affinity matured” antibody or “maturation of an antibody” refers to an antibody with one or more alterations in one or more hypervariable regions (HVRs), compared to a parent or source antibody which does not possess such alterations, such alterations resulting in an improvement in the affinity of the antibody for antigen or to other desired properties of the molecule.

[0140] By “comprising” it is meant that the recited elements are required in the composition/method/kit, but other elements may be included to form the composition/method/kit etc. within the scope of the claim. For example, a composition comprising tetravalent binding antibody molecules is a composition that may comprise other elements in addition to the tetravalent binding antibody molecules, e.g. functional moieties such as polypeptides, small molecules, or nucleic acids bound, e.g. covalently bound, to the tetravalent binding antibody molecules; agents that promote the stability of the tetravalent binding antibody molecule composition, agents that promote the solubility of the tetravalent binding antibody molecule composition, adjuvants, etc. as will be readily understood in the art, with the exception of elements that are encompassed by any negative provisos.

[0141] By “consisting essentially of”, it is meant a limitation of the scope of composition or method described to the specified materials or steps that do not materially affect the basic and novel characteristic(s) of the subject invention. For example, a tetravalent binding antibody molecule “consisting essentially of” a disclosed sequence has the amino acid sequence of the disclosed sequence plus or minus about 5 amino acid residues at the boundaries of the sequence based upon the sequence from which it was derived, e.g. about 5 residues, 4 residues, 3 residues, 2 residues or about 1 residue less than the recited bounding amino acid residue, or about 1 residue, 2 residues, 3 residues, 4 residues, or 5 residues more than the recited bounding amino acid residue.

[0142] By “consisting of”, it is meant the exclusion from the composition, method, or kit of any element, step, or ingredient not specified in the claim. For example, a tetravalent binding antibody molecule “consisting of” a disclosed sequence consists only of the disclosed amino acid sequence.

[0143] Where a range of values is provided, it is understood that each intervening value, to the tenth of the unit of the lower limit unless the context clearly dictates otherwise, between the upper and lower limits of that range is also specifically disclosed. Each smaller range between any stated value or intervening value in a stated range and any other stated or intervening value in that stated range is encompassed within the invention. The upper and lower limits of these smaller ranges may independently be included or excluded in the range, and each range where either, neither or both limits are included in the smaller ranges is also encompassed within the invention, subject to any specifically excluded limit in the stated range. Where the stated range includes one or both of the limits, ranges excluding either or both of those included limits are also included in the invention.

[0144] The basic antibody structural unit is known to comprise a tetramer. Each tetramer is composed of two identical pairs of polypeptide chains, each pair having one “light” (about 25 kDa) and one “heavy” chain (about 50-70 kDa). The amino-terminal portion of each chain includes a variable region of about 100 to 110 or more amino acids primarily responsible for antigen recognition. The carboxy-terminal portion of each chain defines a constant region primarily responsible for effector functions, e.g., binding Fc receptors and activation of antibody-dependent cellular cytotoxicity (ADCC) and complement dependent cytotoxicity (CDC). Methods for dimerizing peptides via a knob-in-hole configuration are described in WO2018/026942, inventors Van Dyk et al., Carter P. (2001) J. Immunol. Methods 248, 7-15; Ridgway et al. (1996) Protein Eng. 9, 617-621; Merchant, et al. (1998) Nat. Biotechnol. 16, 677-681, and; Atwell et al., (1997) J. Mol. Biol. 270, 26-35. The Fc regions may be Merrimack (knob chain: Q347M, Y349F, T350D, T366W and L368M; hole chain: S354I, E357L, T366S, L368A and Y407V), Merchant (knob chain: T366W; hole chain: T336S, L368A and Y407V) or Merchant S:S (Merchant mutations with additional S354C variant in the knob chain and Y349C in the hole chain). The Fc regions may also contain mutations that alter their effector function, e.g., the Fc region may have attenuated effector functions due to amino acid mutations, e.g., DANG variants and LALAPS variants. Methods are well known in the art for mitigating antibody effector function, including for example amino acid substitutions in the Fc regions, e.g., the N297G and D265A, N297G (DANG) variants, L234A, L235A, P331S (LALAPS), LALAPS Merchant, LALAPS Merchant S-S (Merchant A. M. et al Nature Biothechnol 1998 vol 16 p 677-681) variants, or L234A, L235A, P329G (LALA-PG) substitutions, see e.g., Lo et al. “Effector Attenuating Substitutions that Maintain Antibody Stability and Reduce Toxicity in Mice. The Journal of Biological Chemistry Vol. 292, No. 9, pp. 3900-3908 Mar. 3, 2017, incorporated herein by reference. In general, antibody molecules obtained from humans relate to any of the classes IgG, IgM, IgA, IgE and IgD, which differ from one another by the nature of the heavy chain present in the molecule. Certain classes have subclasses as well, such as IgG₁, IgG₂, and others. Furthermore, in humans, the light chain may be a kappa chain or a lambda chain.

[0145] Three highly divergent stretches within each of the heavy chain variable domain, VH or VH domain, and light chain variable domain, VL or VL domain, referred to as complementarity determining regions (CDRs), are interposed between more conserved flanking stretches known as “framework regions”, or “FRs”. Thus, the term “FR” refers to amino acid sequences which are naturally found between, and adjacent to, CDRs in immunoglobulins. A VH domain typically has four FRs, referred to herein as VH framework region 1 (FR1), VH framework region 2 (FR2), VH framework region 3 (FR3), and VH framework region 4 (FR4). Similarly, a VL domain typically has four FRs, referred to herein as VL framework region 1 (FR1), VL framework region 2 (FR2), VL framework region 3 (FR3), and VL framework region 4 (FR4). In an antibody molecule, the three CDRs of a VL domain (CDR-L1, CDR-L2 and CDR-L3) and the three CDRs of a VH domain (CDR-H1, CDR-H2 and CDR-H3) are disposed relative to each other in three-dimensional space to form an antigen-binding site within the antibody variable region. The surface of the antigen-binding site is complementary to a three-dimensional surface of a bound antigen. The amino acid sequences of VL and VH domains may be numbered, and CDRs and FRs therein identified/defined, according to the Kabat numbering system (Kabat et al., 1991, Sequences of Proteins of Immunological Interest, 5th Ed. Public Health Service, National Institutes of Health, Bethesda, Md.) or the INTERNATIONAL IMMUNOGENETICS INFORMATION SYSTEM (IMGT numbering system; Lefranc et al., 2003, Development and Comparative Immunology 27:55-77), both incorporated herein by reference. One of ordinary skill in the art would possess the knowledge for numbering amino acid residues of a VL domain and of a VH domain, and identifying CDRs and FRs therein, according to a routinely employed numbering system such as the IMGT numbering system, the Kabat numbering system, and the like.

[0146] The term “antibody” as referred to herein includes whole antibodies and any antigen binding fragment (i.e., “antigen-binding portion”) or single chain thereof. A “whole antibody” or full-length refers to a glycoprotein comprising at least two heavy (H) chains and two light (L) chains inter-connected by disulfide bonds, or an antigen binding portion thereof. Each heavy chain is comprised of a heavy chain variable region or domain (abbreviated herein as VH) and a heavy chain constant region. The heavy chain constant region is comprised of three domains, CH1, CH2 and CH3. Each light chain is comprised of a light chain variable region or domain (abbreviated herein as VL) and a light chain constant region. The light chain constant region is comprised of one domain, CL or CL1. The VH and VL regions can be further subdivided into regions of hypervariability, termed complementarity determining regions (CDR), interspersed with regions that are more conserved, termed framework regions (FR). Each VH and VL is composed of three CDRs and four FRs, arranged from amino-terminus to carboxy-terminus in the following order: FR1, CDR1, FR2, CDR2, FR3, CDR3, FR4. The variable regions of the heavy and light chains contain a binding domain that interacts with an antigen. The constant regions of the antibodies may mediate the binding of the immunoglobulin to host tissues or factors, including various cells of the immune system (e.g., effector cells) and the first component (Clq) of the classical complement system.

[0147] The term “antigen-binding portion” or “antigen-binding fragment” of an antibody (or simply “antibody portion” or “antibody fragment”), as used herein, refers to one or more fragments, portions or domains of an antibody that retain the ability to specifically bind to an antigen. It has been shown that fragments of a full-length antibody can perform the antigen-binding function of an antibody. Examples of binding fragments encompassed within the term “antigen-binding portion” of an antibody include (i) an Fab fragment, a monovalent fragment consisting of the VL, VH, CL1 and CH1 domains; (ii) an F (ab′) 2 fragment, a bivalent fragment comprising two F (ab)′ fragments linked by a disulfide bridge at the hinge region; (iii) an Fd fragment consisting of the VH and CH1 domains; (iv) an Fv fragment consisting of the VL and VH domains of a single arm of an antibody; (v) a dAb fragment (Ward et al. (1989) Nature 241:544-546), which consists of a VH domain; and (vi) an isolated complementary determining region (CDR). Furthermore, although the two domains of the Fv fragment, VL and VH, are coded for by separate genes, they can be joined, using recombinant methods, by a synthetic linker that enables them to be made as a single contiguous chain in which the VL and VH regions pair to form monovalent molecules (known as single chain Fv (scFv); see e.g., Bird et al. (1988) Science 242:423-426; and Huston et al. (1988) Proc. Natl. Acad. Sci. USA 85:5879-5883). Such single chain antibodies are also intended to be encompassed within the term “antigen-binding portion” of an antibody. Other forms of single chain antibodies, such as diabodies, are also encompassed (see e.g., Holliger et al. (1993) PNAS. USA 90:6444-6448).

[0148] “Diabodies,” or sometimes referred to herein as “Dia,” as used herein are dimeric antibody fragments. In each polypeptide of the diabody, a heavy-chain variable domain (VH) is linked to a light-chain variable domain (VL) but unlike single-chain Fv fragments, the linker between the VL and VH is too short for intramolecular pairing and as such each antigen-binding site is formed by pairing of the VH and VL of one polypeptide with the VH and VL of the other polypeptide. Diabodies thus have two antigen-binding sites, and can be monospecific or bispecific. (see, e.g., Holliger, P., et al. (1993) Proc. Natl. Acad. Sci. USA 90:6444-6448; Poljak, R. J., et al. (1994) Structure 2:1121-1123; Kontermann and Dubel eds., Antibody Engineering (2001) Springer-Verlag. New York. 790 pp. (ISBN 3-540-41354-5) incorporated herein by reference.

[0149] As used herein an “effective amount” of an agent, e.g., the tetravalent binding antibody molecules or a pharmaceutical composition comprising the molecules, refers to an amount effective, at dosages and for periods of time necessary, to achieve the desired result. In some embodiments, a therapeutically effective amount is one that reduces the incidence and/or severity of, stabilizes one or more characteristics of, and/or delays onset of, one or more symptoms of the disease, disorder, and/or condition. In some embodiments, the amount of a FZD Agonists administered to the subject is in the range of about 0.001 mg/kg to 10 mg/kg, 0.5 mg/kg to about 10 mg/kg, or about 0.5 mg/kg to about 1 mg/kg of the subject's body weight. For example, in some embodiments the FZD4 Agonist may be applied to the eye in an amount of, e.g., about 0.02-1.5 mg, about 0.05-1.0 mg, or about 0.1-0.5 mg per eye.

[0150] As used herein, the term “epitope” includes any protein determinant capable of specific binding to an immunoglobulin or fragment thereof, or a T-cell receptor. The term “epitope” includes any protein determinant capable of specific binding to an immunoglobulin or T-cell receptor. Epitopic determinants usually consist of chemically active surface groupings of molecules such as amino acids or sugar side chains and usually have specific three-dimensional structural characteristics, as well as specific charge characteristics. An antibody is said to specifically bind an antigen when the dissociation constant is ≤10 μM; e.g., ≤100 nM, preferably ≤10 nM and more preferably ≤1 nM.

[0151] The constant region of immunoglobulin molecules is also called the fragment crystallizable region, the “Fc region” or “Fc domain.” The Fc domain is composed of two identical protein fragments, derived from the second and third constant domains of the antibody's two heavy chains and the Fc domains of IgGs bear a highly conserved N-glycosylation site. Glycosylation of the Fc fragment is essential for Fc receptor-mediated activity. In an embodiment of the invention the Fc domain of the tetravalent binding antibody molecule is engineered such that it does not target the cell that binds the tetravalent binding antibody molecule for ADCC or CDC-dependent death. In an embodiment of the invention the Fc domain of the tetravalent binding antibody molecule is a peptide dimer in a knob-in-hole configuration. The peptide dimer may be a heterodimer.

[0152] The terms “individual,” “subject,” “host,” and “patient,” are used interchangeably herein and refer to any mammalian subject for whom diagnosis, treatment, or therapy is desired, particularly humans.

[0153] “LRP”, “LRP proteins” and “LRP receptors” is used herein to refer to members of the low density lipoprotein receptor-related protein family. These receptors are single-pass transmembrane proteins that bind and internalize ligands in the process of receptor-mediated endocytosis. LRP proteins LRP5 (e.g., LRP5: NP_002326.2) and LRP6 (e.g., LRP6: NP_002327.2) are included in a Wnt receptor complex required for activation on the Wnt-βcatenin signaling pathway. See also, for human/mouse LRP5 and LRP6: https://www.uniprot.org/uniprot/O75197, https://www.uniprot.org/uniprot/Q91VN0, https://www.uniprot.org/uniprot/O075581, https://www.uniprot.org/uniprot/O88572.

[0154] The term “polypeptide fragment” as used herein refers to a polypeptide that has an amino terminal and/or carboxy-terminal deletion, but where the remaining amino acid sequence is identical to the corresponding positions in the naturally-occurring sequence deduced, for example, from a full-length cDNA sequence.

[0155] As used herein the term “paratope” includes the antigen binding site in the variable region of an antibody that binds to an epitope.

[0156] “Single-chain Fv” or “scFv” antibody fragments comprise the VH and VL domains of an antibody, wherein these domains are present in a single polypeptide chain. Generally, the Fv polypeptide further comprises a polypeptide linker between the VH and VL domains which enables the scFv to form the desired structure for antigen binding. For a review of scFv and other antibody fragments, see James D. Marks, Antibody Engineering, Chapter 2, Oxford University Press (1995) (Carl K. Borrebaeck, Ed.).

[0157] “Single-domain antibody” (sdAb), or “nanobody”, is an antibody fragment consisting of a single monomeric variable antibody domain. “VHH” or “VHH fragment” as used herein refers to a human VH that has been engineered to be independent of the light chain (Nilvebrant et al. Curr Pharm Des. (2016) 22(43):6527-6537; Barthelemy et al., Journal of Biological Chemistry (2007) 283:3639-3654).

[0158] The terms “treatment”, “treating” and the like are used herein to generally mean obtaining a desired pharmacologic and/or physiologic effect. The effect may be prophylactic in terms of completely or partially preventing a disease or symptom thereof and/or may be therapeutic in terms of a partial or complete cure for a disease and/or adverse effect attributable to the disease. “Treatment” as used herein covers any treatment of a disease in a mammal, and includes: (a) preventing the disease from occurring in a subject which may be predisposed to the disease but has not yet been diagnosed as having it; (b) inhibiting the disease, i.e., slowing or arresting its development; or (c) relieving the disease, i.e., causing regression of the disease. The therapeutic agent may be administered before, during or after the onset of disease or injury. The treatment of ongoing disease, where the treatment stabilizes or reduces the undesirable clinical symptoms of the patient, is of particular interest. Such treatment is desirably performed prior to complete loss of function in the affected tissues. The subject therapy may be administered during the symptomatic stage of the disease, and in some cases after the symptomatic stage of the disease.

[0159] The ability of the tetravalent binding antibody molecules of this invention to activate Wnt signaling can be confirmed by a number of assays. The tetravalent binding antibody molecules of this invention typically initiate a reaction or activity that is similar to or the same as that initiated by the FZD receptor's natural ligand. The tetravalent binding antibody molecules of this invention activates the Wnt signaling pathways, e.g., the canonical Wnt-βcatenin signaling pathway. As used herein, the term “activates” refers to a measurable increase in the intracellular level of a Wnt signaling pathway, e.g., the Wnt-βcatenin signaling pathway, compared with the level in the absence of a FZD Agonist of the invention.

[0160] Various methods are known in the art for measuring the level of Wnt-βcatenin activation. These include but are not limited to assays that measure: Wnt-βcatenin target gene expression; LEF/TCF reporter gene expression (such as TopFLASH, superTopFLASH, pBAR); βcatenin stabilization; LRP5/6 phosphorylation; Dishevelled phosphorylation; Axin translocation from cytoplasm to cell membrane and binding to LRP5/6. The canonical Wnt-βcatenin signaling pathway ultimately leads to changes in gene expression through the transcription factors TCF1, TCF7L1, TCF7L2 and LEF1. The transcriptional response to Wnt activation has been characterized in a number of cells and tissues. As such, global transcriptional profiling by methods well known in the art can be used to assess Wnt-βcatenin signaling activation.

[0161] Changes in Wnt-responsive gene expression are generally mediated by TCF and LEF transcription factors. A TCF reporter assay assesses changes in the transcription of TCF/LEF controlled genes to determine the level of Wnt-βcatenin signaling. A TCF reporter assay was first described by Korinek, V. et al., 1997. Also known as TOP/FOP this method involves the use of three copies of the optimal TCF motif CCTTTGATC, or three copies of the mutant motif CCTTTGGCC, upstream of a minimal c-Fos promoter driving luciferase expression (pTOPFLASH and pFOPFLASH, respectively) to determine the transactivational activity of endogenous βcatenin/TCF. A higher ratio of these two reporter activities (TOP/FOP) indicates higher βcatenin/TCF activity. A newer and more sensitive version of this reporter is called pBAR and contains 12 repeats of the TCF motifs (Biechele and Moon, Methods Mol Biol. 2008; 468:99-110, PMID: 19099249).

[0162] General methods in molecular and cellular biochemistry can be found in such standard textbooks as Molecular Cloning: A Laboratory Manual, 3rd Ed. (Sambrook et al., CSH Laboratory Press 2001); Short Protocols in Molecular Biology, 4th Ed. (Ausubel et al. eds., John Wiley & Sons 1999); Protein Methods (Bollag et al., John Wiley & Sons 1996); Nonviral Vectors for Gene Therapy (Wagner et al. eds., Academic Press 1999); Viral Vectors (Kaplift & Loewy eds., Academic Press 1995); Immunology Methods Manual (I. Lefkovits ed., Academic Press 1997); and Cell and Tissue Culture: Laboratory Procedures in Biotechnology (Doyle & Griffiths, John Wiley & Sons 1998).

[0163] Unless otherwise defined, scientific and technical terms used in connection with the present invention shall have the meanings that are commonly understood by those of ordinary skill in the art. Further, unless otherwise required by context, singular terms shall include pluralities and plural terms shall include the singular. Generally, nomenclatures utilized in connection with, and techniques of, cell and tissue culture, molecular biology, and protein and oligo- or polynucleotide chemistry and hybridization described herein are those well-known and commonly used in the art. Standard techniques are used for recombinant DNA, oligonucleotide synthesis, and tissue culture and transformation (e.g., electroporation, lipofection). Enzymatic reactions and purification techniques are performed according to manufacturer's specifications or as commonly accomplished in the art or as described herein. The foregoing techniques and procedures are generally performed according to conventional methods well known in the art and as described in various general and more specific references that are cited and discussed throughout the present specification. See e.g., Sambrook et al. Molecular Cloning: A Laboratory Manual (2d ed., Cold Spring Harbor Laboratory Press, Cold Spring Harbor, N.Y. (1989)). The nomenclatures utilized in connection with, and the laboratory procedures and techniques of, analytical chemistry, synthetic organic chemistry, and medicinal and pharmaceutical chemistry described herein are those well-known and commonly used in the art. Standard techniques are used for chemical syntheses, chemical analyses, pharmaceutical preparation, formulation, and delivery, and treatment of patients.

### EXAMPLES

### Example I Identification and Characterization of FZD4 Binding or FZD5 Binding Fab-Phage

a. FZD4 Antibodies from Affinity Matured Libraries of FZD4-Binding Antibody 5027 and 5044; FZD5 Antibodies from Affinity Matured Libraries of FZD5-Binding Antibody 2919 and 2928.

[0164] Affinity matured libraries of known FZD4-binding antibodies 5027 and 5044 and known FZD5-binding antibodies 2919 and 2928 were prepared using routine methods, essentially as described in US publication no. 2016/0194394, inventors Sidhu et al., see also Persson et al. J. Mol. Biol., 2013 Feb. 22; 425(4):803-11 https://pubmed.ncbi.nlm.nih.gov/23219464/, both incorporated herein in their entirety by reference.

[0165] The 6 CDRs of the heavy chain (CDR-H1, CDR-H2 and CDR-H3) and light chains (CDR-L1, CDR-L2 and CDR-L3) of antibodies 5044, 5027, 2919, and 2928 antibodies isolated from the affinity matured libraries are set forth in Table 1 and Table 2.

[0166] Single point ELISAs were performed on 96-well Maxisorp plates coated with the extracellular domains (ECDs) of human FZD4 protein in the presence or absence of a saturating concentration of 5027 diabody-Fc (a diabody comprising the VL and VH of 5027 linked to an Fc domain). The plates were incubated with monoclonal Fab-phage followed by incubation with horseradish peroxidase (HRP)-conjugated anti-M13 antibody. Wells were subsequently washed 8 times followed by incubations with 3,3,′5,5′-tetramethylbenidine/H₂O₂ peroxidase (TMB) substrate for 5-10 min. The reaction was stopped by adding 1M H₃PO₄ and the absorbance was measured spectrophotometrically at 450 nm in a microtiter plate reader. The results of the assay are depicted in FIG. 1 and FIG. 2 and demonstrate that the newly identified FZD4 antibodies bind FZD4 at a site overlapping with the site recognized by antibody 5027. FZD4 binding antibodies 5027 and 5044 are described in U.S. provisional application No. 62/885,781, incorporated herein by reference.

### B. Epitope Mapping of Lead FZD4 Antibodies.

[0167] ELISA assays were performed in 384-well Maxisorp plates coated with FZD4 ECD wild-type (FZD4) or mutant FZD4 proteins (FZD_swap1-18) that replace segments of the FZD4 ECD with corresponding regions from FZD5. The plates were incubated with 10 nM IgG known to bind specifically to FZD4, i.e., 5044 and 5027, or to be panspecific, i.e., 5016 (binds FZD4, FZD5, and other FZD receptors), followed by incubation with horseradish peroxidase (HRP)-conjugated anti-Kappa light chain antibody. Phosphate buffered saline (PBS) and IgG 4275 which does not bind FZD4 or FZD5 were used as controls. The wells were washed 6 times followed by incubations with 3,3,′5,5′-tetramethylbenidine/H₂O₂ peroxidase (TMB) substrate for 3-5 min. The reaction was stopped by adding 1M H₃PO₄ and the absorbance was measured spectrophotometrically at 450 nm in a microtiter plate reader, see FIG. 2. The pan-FZD binder 5016 is a positive control showing that the antigens are functional, with the exception of “FZD4_Swap10”. Both FZD4-specific antibodies 5027 and 5044 are unable to bind to “FZD4 Swap7”, suggesting that these molecules bind to this region of the FZD ECD.

### C. Characterization of FZD4 IgG.

[0168] FZD4-binding full length IgGs were expressed via transient transfection in an Expi293 cell culture system, essentially as described in Tao et al., Tailored tetravalent antibodies potently and specifically activate Wnt/Frizzled pathways in cells, organoids and mice. Elife. 2019 Aug. 27; 8:e46134. doi: 10.7554/eLife.46134; PMID: 31452509. and purified via Protein A affinity chromatography. Briefly, cells were grown to a density of approximately 2.5×10⁶ cells/ml in Expi293 Expression Media (Gibco) in baffled cell culture flasks and transfected with the appropriate vectors using FectoPRO transfection reagent (Polyplus-transfection) using standard manufacture protocols (ThermoFisher). Expression was allowed to proceed for 5 days at 37° C. and 8% CO₂ with shaking at 125 rpm. After expression, cells were removed by centrifugation and protein was purified from the conditioned media using rProtein A Sepharose (GE Healthcare). Purified protein was buffer exchanged into either PBS or a formulated stabilization buffer (36.8 mM citric acid, 63.2 mM Na₂HPO₄, 10% trehalose, 0.2 M L-arginine, 0.01% Tween-80, pH 6.0) for storage. Proteins concentrations were determined by absorbance at 280 nm and purity was confirmed by SDS-PAGE analysis.

[0169] Expression titers were determined as mg of purified protein per liter of mammalian cell culture. Size exclusion chromatography (SEC) results in Table A below are defined as “−”: evidence of multiple peaks on SEC trace, <50% monomeric species; “+”: >50% monomeric species, delayed retention time (>14 min.); “++”: >90% of major peak at/near expected retention time for a monomeric IgG. Standard retention time was determined by comparison to Trastuzumab.

TABLE A

| | Expression | SEC |
|---|---|---|
| TRAC ID | Titer (mg/l) | Result |
| 13980 | 58 | − |
| 13981 | 40 | − |
| 13982 | 43 | − |
| 13983 | 65 | ++ |
| 13984 | 52 | − |
| 13985 | 61 | ++ |
| 13956 | 47 | + |
| 13957 | 52 | + |
| 13958 | 58 | − |
| 13959 | 46 | + |
| 13962 | 38 | − |
| 13963 | 56 | − |
| 13964 | 47 | − |
| 13965 | 74 | ++ |
| 13966 | 86 | − |
| 13967 | 87 | − |
| 13968 | 89 | + |
| 13969 | 72 | − |
| 13970 | 36 | − |
| 13971 | 46 | ++ |
| 13972 | 27 | + |
| 13973 | 41 | + |
| 13974 | 41 | + |
| 13975 | 41 | ++ |
| 13979 | 49 | − |

[0170] Trac ID corresponds to the antibody number in Table 1 and Table 2.

### D. Size-Exclusion Chromatography Analysis and ELISA Specificity Measurements of the FZD4 IgGs.

[0171] Twenty micrograms of the FZD4 binding IgGs were separated over an AdvanceBio SEC, 300 Å, 2.7 μm, 4.6×300 mm column in a mobile phase of PBS using an Agilent Bio-Inert HPLC. Protein elution was monitored using absorbance at 280 nM. The results are presented in FIG. 3A.

[0172] ELISA specificity measurements of the FZD4 antibodies were determined against FZD1 and FZD10, the two FZD family member most closely related to FZD4. ELISA assays were performed in 384-well Maxisorp plates coated with FZD ECD wild-type or mutant proteins at a concentration of 1 μg/ml and excess binding sites were blocked with 0.5% BSA. The plates were incubated with 10 nM of the FZD4 binding IgGs followed by incubation with horseradish peroxidase (HRP)-conjugated anti-Kappa light chain antibody. The wells were washed 6 times followed by incubations with 3,3,′5,5′-tetramethylbenidine/H₂O₂ peroxidase (TMB) substrate for 3-5 min. The reaction was stopped by adding 1M H₃PO₄ and the absorbance was measured spectrophotometrically at 450 nm in a microtiter plate reader. The results are presented in FIG. 3B.

### E. Identification of the CDRs of the FZD4 or FZD5 Binding Antibodies.

[0173] The amino acid sequences of the CDRs of the FZD4-binding and FZD5-binding immunoglobulins are set forth in Tables 1 and 2. The CDRs were identified according to the INTERNATIONAL IMMUNOGENETICS INFORMATION SYSTEM (IMGT numbering system; Lefranc et al., 2003, Development and Comparative Immunology 27:55-77), and annotated as described in Persson et al. J Mol Biol. 2013 Feb. 22; 425(4):803-11, both incorporated herein by reference.

TABLE 1

| | | FZD4 binding antibodies CDRs | | | | | | | | | | | |
|---|---|---|---|---|---|---|---|---|---|---|---|---|---|
| | | | SEQ | | SEQ | | SEQ | | SEQ | | SEQ | | SEQ |
| Antibody | | | ID | | ID | | ID | | ID | | ID | | ID |
| ID | Library | L1 | NO: | L2 | NO: | L3 | NO: | H1 | NO: | H2 | NO: | H3 | NO: |
| 5044 | F | SVSSA | 1 | SASSLYS | 2 | WYYAPI | 3 | LSSYSM | 24 | YISSYYGYTY | 51 | PAPGHWGF | 79 |
| 13953 | 5044AM | SVSSA | 1 | SASSLYS | 2 | GNYGPI | 4 | LAFYSI | 25 | YISPFSGITH | 52 | PAVGHLAM | 80 |
| 13954 | 5044AM | SVSSA | 1 | SASSLYS | 2 | GYYAPI | 5 | IYSYSI | 26 | YISSYYGYTY | 51 | STVGHGGM | 81 |
| 13955 | 5044AM | SVSSA | 1 | SASSLYS | 2 | WYYAPI | 3 | ISSYSI | 27 | YISPYYSYTY | 53 | PAPAHWGF | 82 |
| 13956 | 5044AM | SVSSA | 1 | SASSLYS | 2 | GYYALI | 6 | LSSYSM | 24 | YISSYAGYTS | 54 | PALGHAGM | 83 |
| 13957 | 5044AM | SVSSA | 1 | SASSLYS | 2 | WYFAPI | 7 | ISAYSI | 28 | YISPYFGLTG | 55 | PAPGHWGM | 84 |
| 13958 | 5044AM | SVSSA | 1 | SASSLYS | 2 | WYYAPI | 3 | LSSYSI | 29 | YISSYYGYTY | 51 | PVAGHGGM | 85 |
| 13959 | 5044AM | SVSSA | 1 | SASSLYS | 2 | GYNAPI | 8 | LYSYSM | 30 | FISSFYGYTD | 56 | PAVGHLAL | 86 |
| 13960 | 5044AM | SVSSA | 1 | SASSLYS | 2 | WYYAPI | 3 | LTSYSM | 31 | YISSYYGSTY | 57 | PAPGHWGM | 84 |
| 13961 | 5044AM | SVSSA | 1 | SASSLYS | 2 | WYYAPI | 3 | ISSYSM | 32 | YISSYYSYTY | 58 | PAPGYGAL | 87 |
| 13962 | 5044AM | SVSSA | 1 | SASSLYS | 2 | GYFAPI | 9 | LFSYPM | 33 | YISPYYGYTN | 59 | QTAGHAGM | 88 |
| 13963 | 5044AM | SVSSA | 1 | SASSLYS | 2 | WFNAPI | 10 | LSAYSM | 34 | YISSYYGYTY | 51 | PAPGHWGF | 79 |
| 13964 | 5044AM | SVSSA | 1 | SASSLYS | 2 | SNYAPI | 11 | ISSHSM | 35 | YISPFFSFTH | 60 | QAPGVSGI | 89 |
| 13965 | 5044AM | SVSSA | 1 | SASSLYS | 2 | WYNAPI | 12 | LSSYSM | 24 | YISSYDSITD | 61 | PAVGHMAF | 90 |
| 13966 | 5044AM | SVSSA | 1 | SASSLYS | 2 | GFYAPI | 13 | LSSYSM | 24 | YISSYYSYTA | 62 | PTPGHGGL | 91 |
| 13967 | 5044AM | SVSSA | 1 | SASSLYS | 2 | WYYAPI | 3 | ISAYAM | 36 | YISPYYGYTF | 63 | PAPGHGGM | 92 |
| 13968 | 5044AM | SVSSA | 1 | SASSLYS | 2 | GYSAPI | 14 | ISTYSM | 37 | YISPHYGFTS | 64 | PAVGHLGM | 93 |
| 13969 | 5044AM | SVSSA | 1 | SASSLYS | 2 | WYFAPI | 7 | LHAFSM | 38 | YISPYYGYTY | 65 | PAPGHWGL | 94 |
| 13970 | 5044AM | SVSSA | 1 | SASSLYS | 2 | GFYAPI | 13 | ISGYSI | 39 | YISSYYGYTF | 66 | TAPGHGAF | 95 |
| 13971 | 5044AM | SVSSA | 1 | SASSLYS | 2 | GFYAPI | 13 | ISNYSI | 40 | IISSNFGYTS | 67 | PALGHLAM | 96 |
| 13972 | 5044AM | SVSSA | 1 | SASSLYS | 2 | GYAGLI | 15 | ISAYSM | 41 | SISSYYGFTS | 68 | LAPGHPAL | 97 |
| 13973 | 5044AM | SVSSA | 1 | SASSLYS | 2 | GFSSPI | 16 | LTSYAM | 42 | YISPYYGYTY | 65 | PAAGHLAL | 98 |
| 13974 | 5044AM | SVSSA | 1 | SASSLYS | 2 | GYYAPI | 5 | LYSYSI | 43 | YISPSYGSTY | 69 | PIPGHLAF | 99 |
| 13975 | 5044AM | SVSSA | 1 | SASSLYS | 2 | GHYAPI | 17 | LSSFSM | 44 | YISSFNGSTF | 70 | PTWAHGAF | 100 |
| 13976 | 5044AM | SVSSA | 1 | SASSLYS | 2 | SFYAPI | 18 | IASYSI | 45 | YISSYYGSTY | 57 | PVLAHSAF | 101 |
| 13977 | 5044AM | SVSSA | 1 | SASSLYS | 2 | GYRAPI | 19 | IHSNSM | 46 | YISPYYSFTS | 71 | QTPGHSGM | 102 |
| 13978 | 5044AM | SVSSA | 1 | SASSLYS | 2 | WHRAPI | 20 | LSTNSM | 47 | YISPYYSFTY | 72 | QAPGPWGM | 103 |
| 13979 | 5044AM | SVSSA | 1 | SASSLYS | 2 | SFYAPI | 18 | LHSFSM | 48 | FISSYYGYTY | 73 | PAPGHGAF | 104 |
| 13980 | 5044AM | SVSSA | 1 | SASSLYS | 2 | GYYAPI | 5 | LTSYSM | 31 | SISPYYSYTN | 74 | PTTAHMAL | 105 |
| 13981 | 5044AM | SVSSA | 1 | SASSLYS | 2 | WYYAPI | 3 | ISSFSI | 49 | FINPYYSYTY | 75 | PAPGHWGM | 84 |
| 13982 | 5044AM | SVSSA | 1 | SASSLYS | 2 | GYYAPI | 5 | ISSYSM | 32 | YISSYYDYTY | 76 | PTPGHSGF | 106 |
| 13983 | 5044AM | SVSSA | 1 | SASSLYS | 2 | GDFAPF | 21 | LPYYSM | 50 | IISSYFGFTY | 77 | PAVGHGAL | 107 |
| 13984 | 5044AM | SVSSA | 1 | SASSLYS | 2 | GYSSPI | 22 | ISSHSM | 35 | YISPYYSYTY | 53 | TAPGHPAM | 108 |
| 13985 | 5044AM | SVSSA | 1 | SASSLYS | 2 | WFYAPI | 23 | ISSYSI | 27 | YISSNFGSTY | 78 | PVPAHGAF | 109 |

TABLE 2A

| | | FZD4 binding antibodies CDRs | | | | | | | | | | | |
|---|---|---|---|---|---|---|---|---|---|---|---|---|---|
| | | | SEQ | | SEQ | | SEQ | | SEQ | | SEQ | | SEQ |
| Antibody | | | ID | | ID | | ID | | ID | | ID | | ID |
| ID | Library | L1 | NO: | L2 | NO: | L3 | NO: | H1 | NO: | H2 | NO: | H3 | NO: |
| 5027 | F | SVSSA | 1 | SASSLYS | 2 | SSYSLI | 130 | SSFYFM | 148 | TVYPYLDYT | 985 | AFPGSYHPM | 199 |
| | | | | | | | | | | Y | | | |
| 13986 | 5027AM | SVSSA | 1 | SASSLYS | 2 | ASYYLI | 110 | STYFFI | 139 | TIYPYLNSTY | 166 | AYPGSYHPL | 198 |
| 13987 | 5027AM | SVSSA | 1 | SASSLYS | 2 | SNYALI | 111 | TSFYFM | 140 | SVYPYLDNTY | 167 | AFPGSYHPM | 199 |
| 13988 | 5027AM | SVSSA | 1 | SASSLYS | 2 | SSSFLI | 112 | SSFYFI | 141 | TVYSYIDITY | 168 | AFPFSYHPM | 200 |
| 13989 | 5027AM | SVSSA | 1 | SASSLYS | 2 | SSDSLI | 113 | SAYYFI | 142 | TVYPYRGYTY | 169 | GYPLAYTPL | 201 |
| 13990 | 5027AM | SVSSA | 1 | SASSLYS | 2 | STHFLI | 114 | SYFYFM | 143 | SVYPYLSYTY | 170 | AFPGSYHPM | 199 |
| 13991 | 5027AM | SVSSA | 1 | SASSLYS | 2 | ASYSLI | 115 | SSFYFI | 141 | SVYPYLDFTY | 171 | ALQGHYHPM | 202 |
| 13992 | 5027AM | SVSSA | 1 | SASSLYS | 2 | SAYTLI | 116 | TSFYYM | 144 | AIYPYLDYTY | 172 | AFPGSYLPM | 203 |
| 13993 | 5027AM | SVSSA | 1 | SASSLYS | 2 | SSVSLI | 117 | FTFYFM | 145 | SIYPYLNYTF | 173 | AFPGSYHPM | 199 |
| 13994 | 5027AM | SVSSA | 1 | SASSLYS | 2 | SYYSLI | 118 | SSYYFI | 146 | TIYPYSDNTY | 174 | GFPGRYHPL | 204 |
| 13995 | 5027AM | SVSSA | 1 | SASSLYS | 2 | SSYYLI | 119 | SSFYVM | 147 | SIYSYGNITY | 175 | AFPLSYHPM | 205 |
| 13996 | 5027AM | SVSSA | 1 | SASSLYS | 2 | ASYYLI | 110 | SSFYFM | 148 | AIYPYLSYTY | 176 | AFPGRYHGM | 206 |
| 13997 | 5027AM | SVSSA | 1 | SASSLYS | 2 | AYYFLI | 120 | SSFYYI | 149 | TVFPYLGRTY | 177 | AFPFSYTPL | 207 |
| 13998 | 5027AM | SVSSA | 1 | SASSLYS | 2 | SSFSLI | 121 | STFYFM | 150 | SVYPYLNYTY | 178 | AFPGAYSPM | 208 |
| 13999 | 5027AM | SVSSA | 1 | SASSLYS | 2 | SAYSLI | 122 | SAFYYM | 151 | TVYPYLSYTY | 179 | AFPGAYHPM | 209 |
| 14000 | 5027AM | SVSSA | 1 | SASSLYS | 2 | SSYALI | 123 | ASFYFM | 152 | TVYPYLNHTY | 180 | AFPGAYHPF | 210 |
| 14001 | 5027AM | SVSSA | 1 | SASSLYS | 2 | SYFSLI | 124 | SAFYFI | 153 | SIYPYLSYTY | 181 | AFPGAYHPM | 209 |
| 14002 | 5027AM | SVSSA | 1 | SASSLYS | 2 | SRFTLI | 125 | FPFYFM | 154 | SVYPYLNDTY | 182 | AYPGFYHPI | 211 |
| 14003 | 5027AM | SVSSA | 1 | SASSLYS | 2 | SSNTLI | 126 | SAFYFM | 155 | SVYSSLSHTY | 183 | AYPLSYHPM | 212 |
| 14004 | 5027AM | SVSSA | 1 | SASSLYS | 2 | SSFSLI | 121 | ASYYFM | 156 | SVYPYLDFTY | 171 | ALPGFYHPF | 213 |
| 14005 | 5027AM | SVSSA | 1 | SASSLYS | 2 | SSFALI | 127 | SVFYFM | 157 | SVYPYNDITY | 184 | GFPGTYHPL | 214 |
| 14006 | 5027AM | SVSSA | 1 | SASSLYS | 2 | ANYALI | 128 | SSLYYM | 158 | SVYPYLDNTH | 185 | AIPGFYHPI | 215 |
| 14008 | 5027AM | SVSSA | 1 | SASSLYS | 2 | ASYSLI | 115 | SNFYLM | 159 | SIYSYLNYTF | 186 | AFPGSYHPM | 199 |
| 14009 | 5027AM | SVSSA | 1 | SASSLYS | 2 | SSASLI | 129 | FSFYFI | 160 | SIYPYLDFTH | 187 | AFPGSYHPL | 216 |
| 14010 | 5027AM | SVSSA | 1 | SASSLYS | 2 | SSYSLI | 130 | SAFYFM | 155 | AIYPYIGYTY | 188 | PFPASYHPL | 217 |
| 14011 | 5027AM | SVSSA | 1 | SASSLYS | 2 | SSYSLI | 130 | SSLYFM | 161 | TIYPFRGTTY | 189 | AYPGRYHPL | 218 |
| 14012 | 5027AM | SVSSA | 1 | SASSLYS | 2 | SAFYLI | 131 | YYFYYM | 162 | AIYPYLGYTY | 190 | AFPGSYHPL | 216 |
| 14013 | 5027AM | SVSSA | 1 | SASSLYS | 2 | SAYFLI | 132 | SSFYFI | 141 | SVYPYLGDTY | 191 | AFPGFYHPF | 219 |
| 14015 | 5027AM | SVSSA | 1 | SASSLYS | 2 | ASSSLI | 133 | TSYYFI | 163 | SVYSYLGYTF | 192 | AFPGSYHPL | 216 |
| 14016 | 5027AM | SVSSA | 1 | SASSLYS | 2 | SIYSLI | 134 | SYFYFM | 143 | AIYPYLSYTY | 176 | AFPGSYHPM | 199 |
| 14018 | 5027AM | SVSSA | 1 | SASSLYS | 2 | ASYYLI | 110 | FSFYFI | 160 | TVYPYLSHTY | 193 | AFPGSYHPM | 199 |
| 14019 | 5027AM | SVSSA | 1 | SASSLYS | 2 | STGSLI | 135 | SDFYFI | 164 | TIYPFIGNTY | 194 | AFPGSYHPF | 220 |
| 14020 | 5027AM | SVSSA | 1 | SASSLYS | 2 | SSHSLI | 136 | SSFYFM | 148 | SVYPYVDYTY | 195 | AFPGFYHPM | 221 |
| 14021 | 5027AM | SVSSA | 1 | SASSLYS | 2 | SSYTLI | 137 | SSFYYM | 165 | TVYPYLSFTY | 196 | ALPGSYHPF | 222 |
| 14022 | 5027AM | SVSSA | 1 | SASSLYS | 2 | SYHYLI | 138 | STFYFM | 150 | SVYPYLDDTY | 197 | AYPGSYHPL | 198 |

TABLE 2B
FZD5 binding antibodies CDRs

| Anti- | Anti- | Selec- | | SEQ | | SEQ | | SEQ | | SEQ | | SEQ | | SEQ |
|---|---|---|---|---|---|---|---|---|---|---|---|---|---|---|
| body | gen | tion | | ID | | ID | | ID | | ID | | ID | | ID |
| ID | Name | ID | L1 | NO: | L2 | NO: | L3 | NO: | H1 | NO: | H2 | NO | H3 | NO: |
| 14023 | FZD5 | 2919AM | SVSSA | 1 | SASS | 2 | WYSG | 223 | LIYTYI | 308 | TIYP | 381 | GAM | |
| | | | | | LYS | | VHGL | | | | ASSS | | | |
| | | | | | | | I | | | | TS | | | |
| 14024 | FZD5 | 2919AM | SVSSA | 1 | SASS | 2 | WFSS | 224 | ITYPGM | 309 | TIFS | 382 | FGM | |
| | | | | | LYS | | AHVP | | | | SHGS | | | |
| | | | | | | | F | | | | TS | | | |
| 14025 | FZD5 | 2919AM | SVSSA | 1 | SASS | 2 | WYSY | 225 | ISYSYM | 310 | SIYS | 383 | GAL | |
| | | | | | LYS | | GHHL | | | | SSSS | | | |
| | | | | | | | I | | | | TS | | | |
| 14026 | FZD5 | 2919AM | SVSSA | 1 | SASS | 2 | WYTS | 226 | ISFFYM | 311 | TIDS | 384 | GAL | |
| | | | | | LYS | | GHVL | | | | STGS | | | |
| | | | | | | | I | | | | TT | | | |
| 14027 | FZD5 | 2919AM | SVSSA | 1 | SASS | 2 | WYAS | 227 | IPYFYM | 312 | SIYS | 385 | GAM | |
| | | | | | LYS | | DHGL | | | | SSGS | | | |
| | | | | | | | I | | | | TS | | | |
| 14028 | FZD5 | 2919AM | SVSSA | 1 | SASS | 2 | WFSP | 228 | ISYYYI | 313 | SIYP | 386 | AAF | |
| | | | | | LYS | | GNVL | | | | SSSS | | | |
| | | | | | | | I | | | | TT | | | |
| 14029 | FZD5 | 2919AM | SVSSA | 1 | SASS | 2 | WYST | 229 | ISYAYM | 314 | SIYP | 387 | YAF | |
| | | | | | LYS | | RNIL | | | | SSSS | | | |
| | | | | | | | I | | | | TA | | | |
| 14030 | FZD5 | 2919AM | SVSSA | 1 | SASS | 2 | WYFS | 230 | ITYFYM | 315 | SIYP | 388 | GGM | |
| | | | | | LYS | | DHDL | | | | SFGS | | | |
| | | | | | | | F | | | | TS | | | |
| 14031 | FZD5 | 2919AM | SVSSA | 1 | SASS | 2 | WYSS | 231 | IYYSYI | 316 | SIYS | 389 | GAM | |
| | | | | | LYS | | GDVL | | | | SNGG | | | |
| | | | | | | | I | | | | TS | | | |
| 14032 | FZD5 | 2919AM | SVSSA | 1 | SASS | 2 | WYSS | 232 | ILNTYM | 317 | SIYP | 387 | GGL | |
| | | | | | LYS | | ADVL | | | | SSSS | | | |
| | | | | | | | F | | | | TA | | | |
| 14033 | FZD5 | 2919AM | SVSSA | 1 | SASS | 2 | WYSS | 233 | ISFYYI | 318 | SIYP | 390 | GGI | |
| | | | | | LYS | | GHGL | | | | ASSS | | | |
| | | | | | | | I | | | | TS | | | |
| 14034 | FZD5 | 2919AM | SVSSA | 1 | SASS | 2 | WYSS | 234 | LAYSYM | 319 | SIYP | 391 | GAM | |
| | | | | | LYS | | GHAL | | | | SSGD | | | |
| | | | | | | | I | | | | TS | | | |
| 14035 | FZD5 | 2919AM | SVSSA | 1 | SASS | 2 | WYSS | 235 | IRYSYI | 320 | AIYS | 392 | GAM | |
| | | | | | LYS | | NHIP | | | | SSSS | | | |
| | | | | | | | I | | | | TS | | | |
| 14036 | FZD5 | 2919AM | SVSSA | 1 | SASS | 2 | WYSS | 236 | ITYSYM | 321 | TIYP | 393 | FAM | |
| | | | | | LYS | | SNVL | | | | SSGS | | | |
| | | | | | | | I | | | | TA | | | |
| 14037 | FZD5 | 2919AM | SVSSA | 1 | SASS | 2 | WYFS | 237 | IINTYM | 322 | SIYS | 394 | GAI | |
| | | | | | LYS | | DRVL | | | | APSS | | | |
| | | | | | | | I | | | | TA | | | |
| 14038 | FZD5 | 2919AM | SVSSA | 1 | SASS | 2 | WYPS | 238 | ISYSYM | 310 | TIYP | 393 | GGM | |
| | | | | | LYS | | SHVL | | | | SSGS | | | |
| | | | | | | | I | | | | TA | | | |
| 14039 | FZD5 | 2919AM | SVSSA | 1 | SASS | 2 | WYSS | 239 | LANSYM | 323 | TIYS | 395 | GAM | |
| | | | | | LYS | | RHHL | | | | SSGS | | | |
| | | | | | | | I | | | | TS | | | |
| 14040 | FZD5 | 2919AM | SVSSA | 1 | SASS | 2 | WYST | 240 | LSYTYM | 324 | SIDP | 396 | FGM | |
| | | | | | LYS | | GRVL | | | | SSGS | | | |
| | | | | | | | F | | | | TS | | | |
| 14041 | FZD5 | 2919AM | SVSSA | 1 | SASS | 2 | WFPT | 241 | ISYSYI | 325 | TIYP | 397 | FGM | |
| | | | | | LYS | | GHVL | | | | SSGS | | | |
| | | | | | | | F | | | | TG | | | |
| 14042 | FZD5 | 2919AM | SVSSA | 1 | SASS | 2 | WYAP | 242 | ISYSYI | 325 | SIYS | 383 | GAM | |
| | | | | | LYS | | RHVL | | | | SSSS | | | |
| | | | | | | | I | | | | TS | | | |
| 14043 | FZD5 | 2919AM | SVSSA | 1 | SASS | 2 | WFTS | 243 | LSYLYI | 326 | SIYP | 398 | GGM | |
| | | | | | LYS | | GLVL | | | | SSSS | | | |
| | | | | | | | F | | | | TS | | | |
| 14044 | FZD5 | 2919AM | SVSSA | 1 | SASS | 2 | WYSS | 244 | ISYAYI | 327 | SIYS | 399 | GAM | |
| | | | | | LYS | | GHVL | | | | SPSS | | | |
| | | | | | | | F | | | | TS | | | |
| 14045 | FZD5 | 2919AM | SVSSA | 1 | SASS | 2 | WYPG | 245 | IAYSYM | 328 | SIYP | 398 | GAM | |
| | | | | | LYS | | APVL | | | | SSSS | | | |
| | | | | | | | I | | | | TS | | | |
| 14046 | FZD5 | 2919AM | SVSSA | 1 | SASS | 2 | WYSS | 236 | FIWESL | 329 | TIYP | 393 | FAM | |
| | | | | | LYS | | SNVL | | LVS | | SSGS | | | |
| | | | | | | | I | | | | TA | | | |
| 14047 | FZD5 | 2919AM | SVSSA | 1 | SASS | 2 | WYSS | 246 | ISHSYM | 330 | SIDS | 400 | GAL | |
| | | | | | LYS | | ANAL | | | | SSGS | | | |
| | | | | | | | F | | | | TS | | | |
| 14048 | FZD5 | 2919AM | SVSSA | 1 | SASS | 2 | WYSS | 231 | LRYSYI | 331 | TIYS | 401 | GAL | |
| | | | | | LYS | | GDVL | | | | ASGS | | | |
| | | | | | | | I | | | | TT | | | |
| 14049 | FZD5 | 2919AM | SVSSA | 1 | SASS | 2 | WYSS | 247 | ISYAYM | 314 | SISP | 402 | GAL | |
| | | | | | LYS | | NHVL | | | | SDSS | | | |
| | | | | | | | I | | | | TS | | | |
| 14050 | FZD5 | 2919AM | SVSSA | 1 | SASS | 2 | WYSA | 248 | ISYSYM | 310 | SIDP | 403 | GAL | |
| | | | | | LYS | | AHIL | | | | SSGL | | | |
| | | | | | | | F | | | | TS | | | |
| 14051 | FZD5 | 2919AM | SVSSA | 1 | SASS | 2 | WFAS | 249 | IRYAYM | 332 | TIDS | 404 | YAM | |
| | | | | | LYS | | GHVL | | | | FSGS | | | |
| | | | | | | | I | | | | TS | | | |
| 14052 | FZD5 | 2919AM | SVSSA | 1 | SASS | 2 | WFSS | 250 | ITHLYM | 333 | SIYP | 405 | AAL | |
| | | | | | LYS | | GDSL | | | | SSGS | | | |
| | | | | | | | I | | | | TS | | | |
| 14053 | FZD5 | 2919AM | SVSSA | 1 | SASS | 2 | WYAS | 251 | LSIFYM | 334 | TIYP | 406 | GAF | |
| | | | | | LYS | | GNVL | | | | SSSS | | | |
| | | | | | | | I | | | | TS | | | |
| 14054 | FZD5 | 2919AM | SVSSA | 1 | SASS | 2 | WFSP | 252 | LSYSYI | 335 | AIYP | 407 | GAM | |
| | | | | | LYS | | GHLL | | | | SPSS | | | |
| | | | | | | | I | | | | TS | | | |
| 14055 | FZD5 | 2919AM | SVSSA | 1 | SASS | 2 | WYPS | 253 | ISYSFM | 336 | SIYS | 408 | GGL | |
| | | | | | LYS | | GHVL | | | | TSGS | | | |
| | | | | | | | F | | | | TS | | | |
| 14056 | FZD5 | 2919AM | SVSSA | 1 | SASS | 2 | WFAA | 254 | IAYVGI | 337 | AITP | 409 | FGF | |
| | | | | | LYS | | GHVL | | | | SSSN | | | |
| | | | | | | | I | | | | TS | | | |
| 14057 | FZD5 | 2919AM | SVSSA | 1 | SASS | 2 | WFRS | 255 | LSYSYM | 338 | SIDP | 410 | FGF | |
| | | | | | LYS | | AHVL | | | | SSSS | | | |
| | | | | | | | I | | | | TA | | | |
| 14058 | FZD5 | 2919AM | SVSSA | 1 | SASS | 2 | WFAS | 256 | ISYSFM | 336 | SIYS | 411 | GAM | |
| | | | | | LYS | | GHIL | | | | RSGS | | | |
| | | | | | | | I | | | | TA | | | |
| 14059 | FZD5 | 2919AM | SVSSA | 1 | SASS | 2 | WFSG | 257 | IAYFYI | 339 | TIDP | 412 | GGL | |
| | | | | | LYS | | GHAL | | | | SSGS | | | |
| | | | | | | | I | | | | TS | | | |
| 14060 | FZD5 | 2919AM | SVSSA | 1 | SASS | 2 | WFAS | 258 | LSSSYM | 340 | SIGP | 413 | FGF | |
| | | | | | LYS | | AHVL | | | | SSGS | | | |
| | | | | | | | F | | | | TS | | | |
| 14061 | FZD5 | 2919AM | SVSSA | 1 | SASS | 2 | WYSP | 259 | LSYSYM | 338 | SIYP | 398 | GGI | |
| | | | | | LYS | | GHVL | | | | SSSS | | | |
| | | | | | | | I | | | | TS | | | |
| 14062 | FZD5 | 2919AM | SVSSA | 1 | SASS | 2 | WYAS | 260 | IYYSYM | 341 | SIDP | 414 | GGM | |
| | | | | | LYS | | GLVL | | | | SSSS | | | |
| | | | | | | | I | | | | TS | | | |
| 14063 | FZD5 | 2919AM | SVSSA | 1 | SASS | 2 | WYTS | 261 | ITYSYM | 321 | SIYP | 415 | GGM | |
| | | | | | LYS | | GHVL | | | | SPSS | | | |
| | | | | | | | F | | | | TS | | | |
| 14064 | FZD5 | 2919AM | SVSSA | 1 | SASS | 2 | WFSF | 262 | LHYGGI | 342 | SISS | 416 | FGF | |
| | | | | | LYS | | PHAL | | | | SFSS | | | |
| | | | | | | | I | | | | TS | | | |
| 14066 | FZD5 | 2919AM | SVSSA | 1 | SASS | 2 | WYAS | 263 | ISYSYM | 310 | TIYS | 417 | GGM | |
| | | | | | LYS | | GTDL | | | | SSSS | | | |
| | | | | | | | I | | | | TA | | | |
| 14067 | FZD5 | 2919AM | SVSSA | 1 | SASS | 2 | WYSS | 264 | IGYAYM | 343 | SIYS | 418 | GAL | |
| | | | | | LYS | | GRLL | | | | SPGS | | | |
| | | | | | | | I | | | | TA | | | |
| 14068 | FZD5 | 2919AM | SVSSA | 1 | SASS | 2 | WFSS | 265 | LSYSSI | 344 | SICP | 419 | FGF | |
| | | | | | LYS | | PHVL | | | | FCSS | | | |
| | | | | | | | F | | | | TS | | | |
| 14069 | FZD5 | 2919AM | SVSSA | 1 | SASS | 2 | WFAS | 266 | LSYDGI | 345 | TIYS | 395 | FGL | |
| | | | | | LYS | | ASSL | | | | SSGS | | | |
| | | | | | | | F | | | | TS | | | |
| 14070 | FZD5 | 2919AM | SVSSA | 1 | SASS | 2 | WYPS | 267 | LSYAYM | 346 | SIHP | 420 | GAL | |
| | | | | | LYS | | SHVL | | | | FDGS | | | |
| | | | | | | | F | | | | TS | | | |
| 14071 | FZD5 | 2919AM | SVSSA | 1 | SASS | 2 | WFPA | 268 | ISYSGI | 347 | SISS | 421 | FGM | |
| | | | | | LYS | | HHVL | | | | SSGS | | | |
| | | | | | | | F | | | | TA | | | |
| 14072 | FZD5 | 2919AM | SVSSA | 1 | SASS | 2 | WFPS | 269 | ISSSYM | 348 | TIDP | 422 | FAM | |
| | | | | | LYS | | GNVL | | | | YAGS | | | |
| | | | | | | | F | | | | TS | | | |
| 14073 | FZD5 | 2919AM | SVSSA | 1 | SASS | 2 | WYSS | 270 | LSYSYM | 338 | SIYP | 423 | GGM | |
| | | | | | LYS | | NNVL | | | | SSGS | | | |
| | | | | | | | I | | | | TA | | | |
| 14074 | FZD5 | 2919AM | SVSSA | 1 | SASS | 2 | WFSS | 271 | LSYSGM | 349 | TIYP | 406 | FGM | |
| | | | | | LYS | | RHVL | | | | SSSS | | | |
| | | | | | | | F | | | | TS | | | |
| 14075 | FZD5 | 2919AM | SVSSA | 1 | SASS | 2 | WYFS | 272 | GFTISY | 350 | SIYP | 424 | GAM | |
| | | | | | LYS | | DHDL | | FFM | | SDSS | | | |
| | | | | | | | I | | | | TS | | | |
| 14076 | FZD5 | 2919AM | SVSSA | 1 | SASS | 2 | WYSS | 273 | ISYSFI | 351 | SIYP | 425 | GAL | |
| | | | | | LYS | | GGVL | | | | SSGH | | | |
| | | | | | | | I | | | | TS | | | |
| 14077 | FZD5 | 2919AM | SVSSA | 1 | SASS | 2 | WFPS | 274 | ISYSYM | 310 | SIDP | 396 | FGM | |
| | | | | | LYS | | GHVL | | | | SSGS | | | |
| | | | | | | | F | | | | TS | | | |
| 14078 | FZD5 | 2919AM | SVSSA | 1 | SASS | 2 | WYSS | 275 | LSYTYM | 324 | SIYS | 426 | GGM | |
| | | | | | LYS | | THVL | | | | SPGS | | | |
| | | | | | | | F | | | | TS | | | |
| 14079 | FZD5 | 2919AM | SVSSA | 1 | SASS | 2 | WYSS | 276 | ISHAYM | 352 | SIYS | 418 | FAL | |
| | | | | | LYS | | GSAL | | | | SPGS | | | |
| | | | | | | | I | | | | TA | | | |
| 14080 | FZD5 | 2919AM | SVSSA | 1 | SASS | 2 | WFSP | 277 | LLFFYM | 353 | SIDP | 427 | GAM | |
| | | | | | LYS | | GSVL | | | | SSGF | | | |
| | | | | | | | I | | | | TS | | | |
| 14081 | FZD5 | 2919AM | SVSSA | 1 | SASS | 2 | WYPS | 278 | IAYSYM | 328 | SIYP | 390 | GGM | |
| | | | | | LYS | | AHIL | | | | ASSS | | | |
| | | | | | | | F | | | | TS | | | |
| 14082 | FZD5 | 2919AM | SVSSA | 1 | SASS | 2 | WYGS | 279 | LSYFYM | 354 | SIFS | 428 | GAM | |
| | | | | | LYS | | GGIL | | | | SSSS | | | |
| | | | | | | | I | | | | TS | | | |
| 14083 | FZD5 | 2919AM | SVSSA | 1 | SASS | 2 | WFTS | 280 | GFTLIS | 355 | SIYP | 429 | GGM | |
| | | | | | LYS | | GRDL | | SSI | | APSS | | | |
| | | | | | | | F | | | | TP | | | |
| 14084 | FZD5 | 2919AM | SVSSA | 1 | SASS | 2 | WYLS | 281 | LSYSYI | 335 | SIYS | 383 | GAM | |
| | | | | | LYS | | RNIL | | | | SSSS | | | |
| | | | | | | | I | | | | TS | | | |
| 14085 | FZD5 | 2919AM | SVSSA | 1 | SASS | 2 | WFSG | 282 | ITNSYM | 356 | SIYS | 399 | GGL | |
| | | | | | LYS | | RDAL | | | | SPSS | | | |
| | | | | | | | F | | | | TS | | | |
| 14369 | FZD5 | 2928AM | SVSSA | 1 | SASS | 2 | AFFY | 283 | ISFSSI | 357 | SIYP | 430 | YYAF | 483 |
| | | | | | LYS | | PI | | | | SYGS | | | |
| | | | | | | | | | | | SF | | | |
| 14370 | FZD5 | 2928AM | SVSSA | 1 | SASS | 2 | AFYF | 284 | ISYSSM | 358 | TIYP | 431 | YYAF | 483 |
| | | | | | LYS | | PI | | | | YYSS | | | |
| | | | | | | | | | | | TL | | | |
| 14371 | FZD5 | 2928AM | SVSSA | 1 | SASS | 2 | AHYF | 285 | ISYSSM | 358 | SIYS | 432 | YYAM | 484 |
| | | | | | LYS | | PI | | | | SYSS | | | |
| | | | | | | | | | | | TY | | | |
| 14372 | FZD5 | 2928AM | SVSSA | 1 | SASS | 2 | AFYF | 284 | ISYSSM | 358 | SIYP | 433 | YYGM | 485 |
| | | | | | LYS | | PI | | | | SYSV | | | |
| | | | | | | | | | | | TY | | | |
| 14373 | FZD5 | 2928AM | SVSSA | 1 | SASS | 2 | SHYY | 286 | LSFSSM | 359 | SIYP | 434 | YYAM | 484 |
| | | | | | LYS | | PI | | | | YYGS | | | |
| | | | | | | | | | | | TF | | | |
| 14374 | FZD5 | 2928AM | SVSSA | 1 | SASS | 2 | AFYF | 284 | ISYSSM | 358 | SIYS | 432 | YYGF | 486 |
| | | | | | LYS | | PI | | | | SYSS | | | |
| | | | | | | | | | | | TY | | | |
| 14375 | FZD5 | 2928AM | SVSSA | 1 | SASS | 2 | GFYY | 287 | ISFGSI | 360 | SIYP | 435 | YYAM | 484 |
| | | | | | LYS | | PI | | | | SYSS | | | |
| | | | | | | | | | | | TF | | | |
| 14376 | FZD5 | 2928AM | SVSSA | 1 | SASS | 2 | AFYY | 288 | ITYSSI | 361 | SIYP | 436 | YYAF | 483 |
| | | | | | LYS | | PI | | | | AYSS | | | |
| | | | | | | | | | | | TY | | | |
| 14377 | FZD5 | 2928AM | SVSSA | 1 | SASS | 2 | SFYF | 289 | ISYSAI | 362 | SIYS | 437 | YYAM | 484 |
| | | | | | LYS | | PI | | | | SYSS | | | |
| | | | | | | | | | | | TF | | | |
| 14378 | FZD5 | 2928AM | SVSSA | 1 | SASS | 2 | AFYF | 284 | ISYSSM | 358 | SIYS | 438 | YYAM | 484 |
| | | | | | LYS | | PI | | | | SYGS | | | |
| | | | | | | | | | | | TY | | | |
| 14379 | FZD5 | 2928AM | SVSSA | 1 | SASS | 2 | ADYF | 290 | ISYSSM | 358 | SIYP | 439 | YYGM | 485 |
| | | | | | LYS | | PI | | | | SYSS | | | |
| | | | | | | | | | | | TY | | | |
| 14380 | FZD5 | 2928AM | SVSSA | 1 | SASS | 2 | AFYY | 288 | ISYSSI | 363 | SIYS | 440 | YYAM | 484 |
| | | | | | LYS | | PI | | | | YYGS | | | |
| | | | | | | | | | | | TY | | | |
| 14381 | FZD5 | 2928AM | SVSSA | 1 | SASS | 2 | AFYF | 284 | ISFSSI | 357 | TIYS | 441 | YYGF | 486 |
| | | | | | LYS | | PI | | | | LFGA | | | |
| | | | | | | | | | | | TF | | | |
| 14382 | FZD5 | 2928AM | SVSSA | 1 | SASS | 2 | SFYF | 289 | ISYSSM | 358 | SIYP | 439 | YYAF | 483 |
| | | | | | LYS | | PI | | | | SYSS | | | |
| | | | | | | | | | | | TY | | | |
| 14383 | FZD5 | 2928AM | SVSSA | 1 | SASS | 2 | AFHY | 291 | ISFSSI | 357 | SIYP | 439 | YYAM | 484 |
| | | | | | LYS | | PI | | | | SYSS | | | |
| | | | | | | | | | | | TY | | | |
| 14384 | FZD5 | 2928AM | SVSSA | 1 | SASS | 2 | AFYY | 288 | ISFSSI | 357 | SIYP | 442 | YYGM | 485 |
| | | | | | LYS | | PI | | | | AYGA | | | |
| | | | | | | | | | | | TF | | | |
| 14385 | FZD5 | 2928AM | SVSSA | 1 | SASS | 2 | AYYY | 292 | ISYSSI | 363 | SIYS | 437 | YYAF | 483 |
| | | | | | LYS | | PI | | | | SYSS | | | |
| | | | | | | | | | | | TF | | | |
| 14386 | FZD5 | 2928AM | SVSSA | 1 | SASS | 2 | VFYY | 293 | ISYSSM | 358 | SIYS | 432 | YYAF | 483 |
| | | | | | LYS | | PI | | | | SYSS | | | |
| | | | | | | | | | | | TY | | | |
| 14387 | FZD5 | 2928AM | SVSSA | 1 | SASS | 2 | SFYF | 289 | ISYSSM | 358 | SIYP | 443 | YYAM | 484 |
| | | | | | LYS | | PI | | | | YYSS | | | |
| | | | | | | | | | | | TY | | | |
| 14388 | FZD5 | 2928AM | SVSSA | 1 | SASS | 2 | AFYF | 284 | LSYSSM | 364 | SIYP | 436 | YYGM | 485 |
| | | | | | LYS | | PI | | | | AYSS | | | |
| | | | | | | | | | | | TY | | | |
| 14389 | FZD5 | 2928AM | SVSSA | 1 | SASS | 2 | ANYF | 294 | ISFGSI | 360 | SIYS | 432 | YYAM | 484 |
| | | | | | LYS | | PI | | | | SYSS | | | |
| | | | | | | | | | | | TY | | | |
| 14390 | FZD5 | 2928AM | SVSSA | 1 | SASS | 2 | GFYF | 295 | ISYSSI | 363 | SIYP | 444 | YYAM | 484 |
| | | | | | LYS | | PI | | | | SFGS | | | |
| | | | | | | | | | | | TY | | | |
| 14391 | FZD5 | 2928AM | SVSSA | 1 | SASS | 2 | AFYF | 284 | ISYSSM | 358 | SIYP | 445 | YYGM | 485 |
| | | | | | LYS | | PI | | | | SFSP | | | |
| | | | | | | | | | | | TY | | | |
| 14392 | FZD5 | 2928AM | SVSSA | 1 | SASS | 2 | AFYF | 284 | IAYSSM | 365 | SIYS | 446 | YYAF | 483 |
| | | | | | LYS | | PI | | | | SYGS | | | |
| | | | | | | | | | | | TF | | | |
| 14393 | FZD5 | 2928AM | SVSSA | 1 | SASS | 2 | AYYF | 296 | ISYSSI | 363 | SIYP | 447 | YYAF | 483 |
| | | | | | LYS | | PI | | | | AYSP | | | |
| | | | | | | | | | | | TY | | | |
| 14394 | FZD5 | 2928AM | SVSSA | 1 | SASS | 2 | AFIF | 297 | ISYSAM | 366 | SIYP | 439 | YYAL | 487 |
| | | | | | LYS | | PI | | | | SYSS | | | |
| | | | | | | | | | | | TY | | | |
| 14395 | FZD5 | 2928AM | SVSSA | 1 | SASS | 2 | AYYY | 292 | ISYGVI | 367 | SIYS | 448 | YYAF | 483 |
| | | | | | LYS | | PI | | | | AYSS | | | |
| | | | | | | | | | | | TF | | | |
| 14396 | FZD5 | 2928AM | SVSSA | 1 | SASS | 2 | SFYF | 289 | ISYSSI | 363 | TIYP | 449 | YYAF | 483 |
| | | | | | LYS | | PI | | | | YYDP | | | |
| | | | | | | | | | | | TY | | | |
| 14397 | FZD5 | 2928AM | SVSSA | 1 | SASS | 2 | AFYF | 284 | LSYSSM | 364 | SIYS | 438 | YYAM | 484 |
| | | | | | LYS | | PI | | | | SYGS | | | |
| | | | | | | | | | | | TY | | | |
| 14398 | FZD5 | 2928AM | SVSSA | 1 | SASS | 2 | AFYY | 288 | ISYSSI | 363 | SIYP | 450 | YYGM | 485 |
| | | | | | LYS | | PI | | | | SYGS | | | |
| | | | | | | | | | | | TY | | | |
| 14399 | FZD5 | 2928AM | SVSSA | 1 | SASS | 2 | AFYF | 284 | ISYSSM | 358 | SIYP | 451 | YYGM | 485 |
| | | | | | LYS | | PI | | | | HYGA | | | |
| | | | | | | | | | | | TF | | | |
| 14400 | FZD5 | 2928AM | SVSSA | 1 | SASS | 2 | AFYY | 288 | ISYSSI | 363 | SIYP | 452 | YYAM | 484 |
| | | | | | LYS | | PI | | | | SYGS | | | |
| | | | | | | | | | | | TF | | | |
| 14401 | FZD5 | 2928AM | SVSSA | 1 | SASS | 2 | AFFF | 298 | ISYSSI | 363 | SIYS | 453 | YYAM | 484 |
| | | | | | LYS | | PI | | | | SYSA | | | |
| | | | | | | | | | | | TY | | | |
| 14402 | FZD5 | 2928AM | SVSSA | 1 | SASS | 2 | SFYY | 299 | ISYSSM | 358 | SIYP | 439 | YYAF | 483 |
| | | | | | LYS | | PI | | | | SYSS | | | |
| | | | | | | | | | | | TY | | | |
| 14403 | FZD5 | 2928AM | SVSSA | 1 | SASS | 2 | AFYF | 284 | IPYGSM | 368 | SIYP | 452 | YYAM | 484 |
| | | | | | LYS | | PI | | | | SYGS | | | |
| | | | | | | | | | | | TF | | | |
| 14404 | FZD5 | 2928AM | SVSSA | 1 | SASS | 2 | ALYY | 300 | ISYSSM | 358 | SIYP | 435 | YYAM | 484 |
| | | | | | LYS | | PI | | | | SYSS | | | |
| | | | | | | | | | | | TF | | | |
| 14405 | FZD5 | 2928AM | SVSSA | 1 | SASS | 2 | AFYF | 284 | ISYSAM | 366 | SIYP | 454 | YYAF | 483 |
| | | | | | LYS | | PI | | | | YYGP | | | |
| | | | | | | | | | | | TY | | | |
| 14406 | FZD5 | 2928AM | SVSSA | 1 | SASS | 2 | VFYY | 293 | ISYSSI | 363 | SIYP | 455 | FYAF | 488 |
| | | | | | LYS | | PI | | | | FYGS | | | |
| | | | | | | | | | | | TF | | | |
| 14407 | FZD5 | 2928AM | SVSSA | 1 | SASS | 2 | RFYF | 301 | ISYSSI | 363 | AIYP | 456 | YYAM | 484 |
| | | | | | LYS | | PI | | | | SYSS | | | |
| | | | | | | | | | | | TN | | | |
| 14408 | FZD5 | 2928AM | SVSSA | 1 | SASS | 2 | AFYY | 288 | ISYSSI | 363 | SIYP | 457 | YYAM | 484 |
| | | | | | LYS | | PI | | | | YYSS | | | |
| | | | | | | | | | | | TH | | | |
| 14409 | FZD5 | 2928AM | SVSSA | 1 | SASS | 2 | LYYF | 302 | IAYSAM | 369 | SIYP | 458 | YYAM | 484 |
| | | | | | LYS | | PI | | | | SYST | | | |
| | | | | | | | | | | | TY | | | |
| 14410 | FZD5 | 2928AM | SVSSA | 1 | SASS | 2 | AFYF | 284 | LSFSSI | 370 | SIYP | 435 | YYAF | 483 |
| | | | | | LYS | | PI | | | | SYSS | | | |
| | | | | | | | | | | | TF | | | |
| 14411 | FZD5 | 2928AM | SVSSA | 1 | SASS | 2 | AYYF | 296 | ISYSSM | 358 | SIYS | 438 | YYGM | 485 |
| | | | | | LYS | | PI | | | | SYGS | | | |
| | | | | | | | | | | | TY | | | |
| 14412 | FZD5 | 2928AM | SVSSA | 1 | SASS | 2 | SSYF | 303 | ISYSSM | 358 | SIYS | 459 | YYAM | 484 |
| | | | | | LYS | | PI | | | | NYSS | | | |
| | | | | | | | | | | | SY | | | |
| 14413 | FZD5 | 2928AM | SVSSA | 1 | SASS | 2 | AFYF | 284 | LTYSSI | 371 | TIYP | 460 | YYAM | 484 |
| | | | | | LYS | | PI | | | | SYGS | | | |
| | | | | | | | | | | | TY | | | |
| 14414 | FZD5 | 2928AM | SVSSA | 1 | SASS | 2 | AFYF | 284 | ISYSSM | 358 | SIYP | 461 | YYAI | 489 |
| | | | | | LYS | | PI | | | | SFGS | | | |
| | | | | | | | | | | | TF | | | |
| 14415 | FZD5 | 2928AM | SVSSA | 1 | SASS | 2 | AHYF | 285 | LSYGSI | 372 | SIYP | 450 | YYGM | 485 |
| | | | | | LYS | | PI | | | | SYGS | | | |
| | | | | | | | | | | | TY | | | |
| 14416 | FZD5 | 2928AM | SVSSA | 1 | SASS | 2 | ASYF | 304 | ISYSSM | 358 | TIYP | 462 | YYAM | 484 |
| | | | | | LYS | | PI | | | | SYSS | | | |
| | | | | | | | | | | | TY | | | |
| 14417 | FZD5 | 2928AM | SVSSA | 1 | SASS | 2 | AFYF | 284 | IAYSSM | 365 | TIYS | 463 | YYAF | 483 |
| | | | | | LYS | | PI | | | | SYGA | | | |
| | | | | | | | | | | | TS | | | |
| 14418 | FZD5 | 2928AM | SVSSA | 1 | SASS | 2 | AHYY | 305 | ISYSSI | 363 | SIYP | 464 | YYAM | 484 |
| | | | | | LYS | | PI | | | | SYSS | | | |
| | | | | | | | | | | | TI | | | |
| 14419 | FZD5 | 2928AM | SVSSA | 1 | SASS | 2 | AGFF | 306 | ISYSSI | 363 | TIYP | 465 | YYGF | 486 |
| | | | | | LYS | | PI | | | | YYGA | | | |
| | | | | | | | | | | | TY | | | |
| 14420 | FZD5 | 2928AM | SVSSA | 1 | SASS | 2 | SSYY | 307 | ISYSSI | 363 | SIYS | 466 | YYAM | 484 |
| | | | | | LYS | | PI | | | | GYSA | | | |
| | | | | | | | | | | | TY | | | |
| 14421 | FZD5 | 2928AM | SVSSA | 1 | SASS | 2 | AFYF | 284 | ITYSSM | 373 | SIYP | 450 | YYGF | 486 |
| | | | | | LYS | | PI | | | | SYGS | | | |
| | | | | | | | | | | | TY | | | |
| 14422 | FZD5 | 2928AM | SVSSA | 1 | SASS | 2 | AFYF | 284 | ISYSSI | 363 | TIYP | 462 | YYAM | 484 |
| | | | | | LYS | | PI | | | | SYSS | | | |
| | | | | | | | | | | | TY | | | |
| 14423 | FZD5 | 2928AM | SVSSA | 1 | SASS | 2 | AFYF | 284 | LGYGSM | 374 | SIYP | 450 | YYAM | 484 |
| | | | | | LYS | | PI | | | | SYGS | | | |
| | | | | | | | | | | | TY | | | |
| 14424 | FZD5 | 2928AM | SVSSA | 1 | SASS | 2 | AFYF | 284 | ISYSSM | 358 | SIYP | 467 | YFAL | 490 |
| | | | | | LYS | | PI | | | | SYSA | | | |
| | | | | | | | | | | | TF | | | |
| 14425 | FZD5 | 2928AM | SVSSA | 1 | SASS | 2 | AFYY | 288 | IGYSSI | 375 | TIYP | 468 | YYAF | 483 |
| | | | | | LYS | | PI | | | | SYSS | | | |
| | | | | | | | | | | | TF | | | |
| 14426 | FZD5 | 2928AM | SVSSA | 1 | SASS | 2 | AFYY | 288 | ITYGSI | 376 | AIYS | 469 | YYAF | 483 |
| | | | | | LYS | | PI | | | | SYGS | | | |
| | | | | | | | | | | | TY | | | |
| 14427 | FZD5 | 2928AM | SVSSA | 1 | SASS | 2 | AFYY | 288 | ISYSSM | 358 | SIFP | 470 | YYGF | 486 |
| | | | | | LYS | | PI | | | | YYGS | | | |
| | | | | | | | | | | | TY | | | |
| 14428 | FZD5 | 2928AM | SVSSA | 1 | SASS | 2 | AFYF | 284 | ISYSSM | 358 | SIYP | 471 | YYAM | 484 |
| | | | | | LYS | | PI | | | | FYST | | | |
| | | | | | | | | | | | TF | | | |
| 14429 | FZD5 | 2928AM | SVSSA | 1 | SASS | 2 | SSYY | 307 | ISYGSM | 377 | SIYP | 467 | YYGM | 485 |
| | | | | | LYS | | PI | | | | SYSA | | | |
| | | | | | | | | | | | TF | | | |
| 14430 | FZD5 | 2928AM | SVSSA | 1 | SASS | 2 | AFYY | 288 | ISYSSM | 358 | SIYP | 472 | YYGM | 485 |
| | | | | | LYS | | PI | | | | SYGS | | | |
| | | | | | | | | | | | TS | | | |
| 14431 | FZD5 | 2928AM | SVSSA | 1 | SASS | 2 | AFYF | 284 | IYYSSM | 378 | SIYP | 473 | YYGM | 485 |
| | | | | | LYS | | PI | | | | TYGS | | | |
| | | | | | | | | | | | TV | | | |
| 14432 | FZD5 | 2928AM | SVSSA | 1 | SASS | 2 | AFYF | 284 | ISYSSI | 363 | TIYP | 474 | YYAM | 484 |
| | | | | | LYS | | PI | | | | NYSS | | | |
| | | | | | | | | | | | TY | | | |
| 14433 | FZD5 | 2928AM | SVSSA | 1 | SASS | 2 | AFYF | 284 | IFYSSM | 379 | SIYP | 475 | YYAM | 484 |
| | | | | | LYS | | PI | | | | SYSA | | | |
| | | | | | | | | | | | TY | | | |
| 14434 | FZD5 | 2928AM | SVSSA | 1 | SASS | 2 | AFYY | 288 | ISYSSM | 358 | SIYP | 476 | YYAM | 484 |
| | | | | | LYS | | PI | | | | GYSS | | | |
| | | | | | | | | | | | TY | | | |
| 14435 | FZD5 | 2928AM | SVSSA | 1 | SASS | 2 | AHYF | 285 | IAYSSM | 365 | TIYP | 462 | YYAM | 484 |
| | | | | | LYS | | PI | | | | SYSS | | | |
| | | | | | | | | | | | TY | | | |
| 14436 | FZD5 | 2928AM | SVSSA | 1 | SASS | 2 | AFYY | 288 | ISYSSI | 363 | SIYP | 477 | YYGM | 485 |
| | | | | | LYS | | PI | | | | SYSS | | | |
| | | | | | | | | | | | TS | | | |
| 14437 | FZD5 | 2928AM | SVSSA | 1 | SASS | 2 | AFYF | 284 | ISYSSM | 358 | SIYS | 478 | YYGM | 485 |
| | | | | | LYS | | PI | | | | GYGS | | | |
| | | | | | | | | | | | TY | | | |
| 14438 | FZD5 | 2928AM | SVSSA | 1 | SASS | 2 | AFYF | 284 | ISYSSM | 358 | SIYP | 450 | YYGM | 485 |
| | | | | | LYS | | PI | | | | SYGS | | | |
| | | | | | | | | | | | TY | | | |
| 14439 | FZD5 | 2928AM | SVSSA | 1 | SASS | 2 | AFYF | 284 | LSFSSM | 359 | SIYS | 466 | YYAL | 487 |
| | | | | | LYS | | PI | | | | GYSA | | | |
| | | | | | | | | | | | TY | | | |
| 14440 | FZD5 | 2928AM | SVSSA | 1 | SASS | 2 | AYYF | 296 | ISYSSM | 358 | SIYP | 479 | YYAF | 483 |
| | | | | | LYS | | PI | | | | SYGS | | | |
| | | | | | | | | | | | TN | | | |
| 14441 | FZD5 | 2928AM | SVSSA | 1 | SASS | 2 | AFYF | 284 | LSYSSI | 344 | SIYP | 480 | YYGM | 485 |
| | | | | | LYS | | PI | | | | TYGS | | | |
| | | | | | | | | | | | AY | | | |
| 14442 | FZD5 | 2928AM | SVSSA | 1 | SASS | 2 | AFYF | 284 | ITYSSM | 373 | TIYS | 481 | YYAM | 484 |
| | | | | | LYS | | PI | | | | SYGS | | | |
| | | | | | | | | | | | TY | | | |
| 14443 | FZD5 | 2928AM | SVSSA | 1 | SASS | 2 | AFYF | 284 | ISFSSM | 380 | AIYP | 482 | YYGF | 486 |
| | | | | | LYS | | PI | | | | YYGS | | | |
| | | | | | | | | | | | TY | | | |
| 14444 | FZD5 | 2928AM | SVSSA | 1 | SASS | 2 | AHYF | 285 | ISYSSM | 358 | SIYS | 438 | YYGM | 485 |
| | | | | | LYS | | PI | | | | SYGS | | | |
| | | | | | | | | | | | TY | | | |
| 14445 | FZD5 | 2928AM | SVSSA | 1 | SASS | 2 | ASYF | 304 | LSYSSM | 364 | SIYP | 435 | YYAM | 484 |
| | | | | | LYS | | PI | | | | SYSS | | | |
| | | | | | | | | | | | TF | | | |
| 14446 | FZD5 | 2928AM | SVSSA | 1 | SASS | 2 | AFYY | 288 | ISYGSM | 377 | SIYP | 450 | YYGM | 485 |
| | | | | | LYS | | PI | | | | SYGS | | | |
| | | | | | | | | | | | TY | | | |

### Example 2: Identification and Characterization of LRP Binding Synthetic Antibodies

### A. Phage Clonal ELISA of Synthetic Antibodies Targeting LRP5 and LRP6.

[0174] Single point ELISAs were performed on 96-well Maxisorp plates coated with the ECDs of mouse LRP5-his protein or human Fc and blocked with BSA (0.5%). The plates were incubated with monoclonal Fab-phage, or VH-phage and titers >10⁹ phage/ml followed by incubation with horseradish peroxidase (HRP)-conjugated anti-M13 antibody. The wells were washed 8 times followed by incubations with 3,3,′5,5′-tetramethylbenidine/H₂O₂ peroxidase (TMB) substrate for 5-10 min. the reaction was stopped by adding 1M H₃PO₄ and the absorbance was measured spectrophotometrically at 450 nm in a microtiter plate reader. The results are presented in FIG. 4. The results demonstrate that the synthetic antibodies bound to LRP5. LRP5 binding antibodies, 2459, 2460 and 8716, are described in U.S. provisional application No. 62/886,913, incorporated herein by reference.

[0175] Single point ELISAs were performed on 96-well Maxisorp plates coated with the ECDs of human LRP6-Fc protein chimeras. The plates were incubated with the monoclonal Fab-phage, or VH-phage and titers >109 phage/ml followed by incubation with horseradish peroxidase (HRP)-conjugated anti-M13 antibody. The wells were washed 8 times followed by incubations with 3,3,′5,5′-tetramethylbenidine/H₂O₂ peroxidase (TMB) substrate for 5-10 min. the reaction was stopped by adding 1M H₃PO₄ and the absorbance was measured spectrophotometrically at 450 nm in a microtiter plate reader. The results are presented in FIGS. 5A and 5B. The results demonstrate the synthetic antibodies bound to LRP6. LRP6 binding antibodies, 2539, 2540, and 2542 are described in U.S. provisional application No. 62/886,918, incorporated herein by reference.

### B. Identification of the CDRs of the Synthetic Antibodies Targeting LRP5 and LRP6.

[0176] The CDRs of the LRP5-binding and LRP6-binding immunoglobulins set forth in Tables 3 and 4 were identified according to the INTERNATIONAL IMMUNOGENETICS INFORMATION SYSTEM (IMGT numbering system; Lefranc et al., 2003, Development and Comparative Immunology 27:55-77) and annotated as described in Persson et al. J Mol Biol. 2013 Feb. 22; 425(4):803-11, both incorporated herein by reference.

TABLE 3

| | | | LRP5-binding antibodies CDRs | | | | | | | | | | | |
|---|---|---|---|---|---|---|---|---|---|---|---|---|---|---|
| Anti- | | | | SEQ | | SEQ | | SEQ | | SEQ | | SEQ | | SEQ |
| body | LRP5-antibody | | | ID | | ID | | ID | | ID | | ID | | ID |
| ID | Library | Antigen | L1 | NO | L2 | NO: | L3 | NO: | H1 | NO: | H2 | NO: | H3 | NO: |
| 2459 | F | mLRP5 | SVSSA | 1 | SASSL | 2 | ASYAP | 492 | LSYYY | 527 | SIYSS | 552 | WSHVS | 584 |
| | | -his | | | YS | | I | | M | | YGYTY | | GHYSG | |
| | | | | | | | | | | | | | M | |
| 2460 | F | mLRP5 | SVSSA | 1 | SASSL | 2 | SSYSL | 130 | FSSSS | 528 | SISSS | 553 | GGSGV | 585 |
| | | -his | | | YS | | I | | I | | YGYTY | | SHYGS | |
| | | | | | | | | | | | | | VYYSW | |
| | | | | | | | | | | | | | WAL | |
| 8716 | F | mLRP5 | SVSSA | 1 | SASSL | 2 | YWAYY | 493 | FSSSS | 528 | SISSS | 553 | SWAM | 586 |
| | | -his | | | YS | | SPI | | I | | YGYTY | | | |
| 9931 | F | mLRP5 | SVSSA | 1 | SASSL | 2 | SSSGH | 494 | LYYYS | 529 | YISSY | 554 | WSHVV | 587 |
| | | -his | | | YS | | LI | | M | | YSYTS | | GAHYG | |
| | | | | | | | | | | | | | WAI | |
| 9932 | F | mLRP5 | SVSSA | 1 | SASSL | 2 | PYGYP | 495 | IYYYS | 530 | SISSY | 555 | SWWYW | 588 |
| | | -his | | | YS | | I | | M | | YGYTS | | SYHGY | |
| | | | | | | | | | | | | | AAM | |
| 9933 | F | mLRP5 | SVSSA | 1 | SASSL | 2 | FHGLI | 496 | ISSSY | 348 | SIYSY | 556 | GYSYV | 589 |
| | | -his | | | YS | | | | M | | SSYTS | | WYGVY | |
| | | | | | | | | | | | | | YHGYG | |
| | | | | | | | | | | | | | AM | |
| 9934 | F | mLRP5 | SVSSA | 1 | SASSL | 2 | YWFLI | 497 | LYYYY | 531 | SISPY | 557 | SGYGW | 590 |
| | | -his | | | YS | | | | I | | YGYTS | | YAM | |
| 9935 | F | mLRP5 | SVSSA | 1 | SASSL | 2 | HSYGY | 498 | ISYSY | 310 | SISSS | 553 | SYYWG | 591 |
| | | -his | | | YS | | PI | | M | | YGYTY | | YWAAL | |
| 9936 | F | mLRP5 | SVSSA | 1 | SASSL | 2 | YYAWY | 499 | ISYYS | 532 | SIYSS | 552 | GGVYY | 592 |
| | | -his | | | YS | | LI | | M | | YGYTY | | YPSYA | |
| | | | | | | | | | | | | | GWPYG | |
| | | | | | | | | | | | | | M | |
| 9937 | F | mLRP5 | SVSSA | 1 | SASSL | 2 | AAYSP | 500 | ISSSY | 348 | SIYPS | 558 | HYAWW | 593 |
| | | -his | | | YS | | I | | M | | YGYTY | | VGAF | |
| 9938 | F | mLRP5 | SVSSA | 1 | SASSL | 2 | YYSWY | 501 | ISYSY | 310 | SIYSY | 559 | GGGAH | 594 |
| | | -his | | | YS | | PPF | | M | | YSYTS | | GWGYS | |
| | | | | | | | | | | | | | L | |
| 9939 | F | mLRP5 | SVSSA | 1 | SASSL | 2 | SFYPI | 502 | LSSYS | 29 | SIYPY | 560 | SGPVY | 595 |
| | | -his | | | YS | | | | I | | YGYTS | | ASYSW | |
| | | | | | | | | | | | | | AWYYY | |
| | | | | | | | | | | | | | GAL | |
| 9940 | F | mLRP5 | SVSSA | 1 | SASSL | 2 | YYWYP | 503 | LSYYY | 533 | SIYSY | 561 | YSWGA | 596 |
| | | -his | | | YS | | F | | I | | YSSTY | | YGYGA | |
| | | | | | | | | | | | | | M | |
| 9941 | F | mLRP5 | SVSSA | 1 | SASSL | 2 | WGSPI | 504 | FSSSS | 528 | SIYPS | 562 | YYYHY | 597 |
| | | -his | | | YS | | | | I | | SGSTY | | SVPVY | |
| | | | | | | | | | | | | | AAL | |
| 9942 | F | mLRP5 | SVSSA | 1 | SASSL | 2 | YSSWY | 505 | LYYYS | 529 | SIYPS | 562 | SPYYG | 598 |
| | | -his | | | YS | | LI | | M | | SGSTY | | FYYSG | |
| | | | | | | | | | | | | | FYHWV | |
| | | | | | | | | | | | | | FYGF | |
| 9943 | F | mLRP5 | SVSSA | 1 | SASSL | 2 | GAYLI | 506 | LYYSS | 534 | YIYSY | 563 | AAWGW | 599 |
| | | -his | | | YS | | | | M | | YGYTY | | HPAF | |
| 9944 | F | mLRP5 | SVSSA | 1 | SASSL | 2 | HFYYY | 507 | YSSYI | 535 | YISSY | 57 | GGGFY | 500 |
| | | -his | | | YS | | PI | | | | YGSTY | | YAGGW | |
| | | | | | | | | | | | | | PYASY | |
| | | | | | | | | | | | | | AWAF | |
| 9945 | F | mLRP5 | SVSSA | 1 | SASSL | 2 | AFHSP | 508 | LYYSS | 534 | YIYPY | 564 | AWYSY | 601 |
| | | -his | | | YS | | I | | M | | YGYTS | | YVGL | |
| 9946 | F | mLRP5 | SVSSA | 1 | SASSL | 2 | AWYPI | 509 | ISYSS | 358 | SIYPY | 565 | GVYYG | 602 |
| | | -his | | | YS | | | | M | | YGSTY | | GGYWA | |
| | | | | | | | | | | | | | GGYYP | |
| | | | | | | | | | | | | | AAL | |
| 12600 | H | mLRP5 | SVSSA | 1 | SASDL | 491 | YAGAG | 510 | FTAYA | 536 | SIYPS | 566 | RSYYF | 603 |
| | | -his | | | YS | | LI | | M | | GGYTA | | AL | |
| 12601 | H | mLRP5 | SVSSA | 1 | SASDL | 491 | SYSYP | 511 | LGGYG | 537 | GIYPS | 567 | SSTYS | 604 |
| | | -his | | | YS | | I | | I | | GGYTA | | SYYYH | |
| | | | | | | | | | | | | | FYAL | |
| 12602 | H | mLRP5 | SVSSA | 1 | SASDL | 491 | YYRSR | 512 | FASAW | 538 | RISPS | 568 | STRWH | 605 |
| | | -his | | | YS | | LI | | M | | GGYTA | | SAYAY | |
| | | | | | | | | | | | | | YYSHA | |
| | | | | | | | | | | | | | M | |
| 12603 | H | mLRP5 | SVSSA | 1 | SASDL | 491 | SYFYP | 513 | IGGAA | 539 | GISAS | 569 | SRPSW | 606 |
| | | -his | | | YS | | I | | M | | GGATA | | YWSYH | |
| | | | | | | | | | | | | | YFAL | |
| 12604 | H | mLRP5 | SVSSA | 1 | SASDL | 491 | GFFPI | 514 | FSSSS | 528 | GISTS | 570 | SYYGY | 607 |
| | | -his | | | YS | | | | I | | GGATA | | SRGF | |
| 12605 | H | mLRP5 | SVSSA | 1 | SASDL | 491 | SHSYP | 515 | FASYG | 540 | SIYPS | 566 | SYSFH | 608 |
| | | -his | | | YS | | I | | M | | GGYTA | | YAWPR | |
| | | | | | | | | | | | | | YHYGA | |
| | | | | | | | | | | | | | L | |
| 12606 | H | mLRP5 | SVSSA | 1 | SASDL | 491 | SHYYP | 286 | IAGSS | 541 | GISAS | 571 | YDSGY | 609 |
| | | -his | | | YS | | I | | I | | GGYTA | | YAWYY | |
| | | | | | | | | | | | | | HDRAM | |
| 12607 | H | mLRP5 | SVSSA | 1 | SASDL | 491 | RGSGP | 516 | LTGDW | 542 | GIYPS | 572 | FGSPH | 610 |
| | | -his | | | YS | | I | | M | | GGATA | | YGM | |
| 12608 | H | mLRP5 | SVSSA | 1 | SASDL | 491 | RYSGG | 517 | FTSYS | 543 | GIYPS | 573 | PRYYA | 611 |
| | | -his | | | YS | | LI | | M | | GGSTA | | YYSGG | |
| | | | | | | | | | | | | | F | |
| 12609 | H | mLRP5 | SVSSA | 1 | SASDL | 491 | SARYY | 518 | LNAAA | 544 | GISAS | 574 | SHSSG | 612 |
| | | -his | | | YS | | YLI | | M | | RGATA | | SRSRG | |
| | | | | | | | | | | | | | L | |
| 12610 | H | mLRP5 | SVSSA | 1 | SASDL | 491 | SSYSL | 130 | LAGAG | 545 | RISTS | 575 | YSFRY | 613 |
| | | -his | | | YS | | I | | M | | GGYTA | | PSYAM | |
| 12611 | H | mLRP5 | SVSSA | 1 | SASDL | 491 | SYRGY | 519 | IGGAA | 539 | GIYAS | 576 | GSRYS | 614 |
| | | -his | | | YS | | YLI | | M | | GGATA | | GF | |
| 13218 | | 2539A | SVSSA | 1 | SASSL | 2 | FSWGL | 520 | ISYYP | 546 | YISPY | 577 | HYYFR | 615 |
| | | MmLRP | | | YS | | I | | M | | SGYTF | | WSRGM | |
| | | 5-his | | | | | | | | | | | | |
| 13219 | | 2539A | SVSSA | 1 | SASSL | 2 | YSWLP | 521 | IVFGS | 547 | HIAPY | 578 | VNFIR | 616 |
| | | MmLRP | | | YS | | I | | I | | YGFTY | | RFRGM | |
| | | 5-his | | | | | | | | | | | | |
| 13378 | | 2542A | SVSSA | 1 | SASSL | 2 | FFRPI | 522 | ISSNY | 548 | SINPS | 579 | AVRRS | 617 |
| | | MmLRP | | | YS | | | | I | | YSYTF | | QGI | |
| | | 5-his | | | | | | | | | | | | |
| 13379 | | 2539A | SVSSA | 1 | SASSL | 2 | YSRRL | 523 | LTYTS | 549 | SISPF | 580 | FPYFA | 618 |
| | | MmLRP | | | YS | | F | | M | | HGHTF | | WVGGM | |
| | | 5-his | | | | | | | | | | | | |
| 13380 | | 2539A | SVSSA | 1 | SASSL | 2 | FIRVP | 524 | ITYYS | 550 | SITSY | 581 | SHYFP | 619 |
| | | MmLRP | | | YS | | I | | M | | YGNTD | | WTVAL | |
| | | 5-his | | | | | | | | | | | | |
| 13558 | | 2540A | SVSSA | 1 | SASSL | 2 | FYVPF | 525 | N.D. | | SIYPY | 582 | ASYHA | 620 |
| | | MmLRP | | | YS | | | | | | YGFTD | | SFDGL | |
| | | 5-his | | | | | | | | | | | | |
| 13559 | | 2540A | SVSSA | 1 | SASSL | 2 | GYSFG | 526 | IADSS | 551 | SISPY | 583 | TSIFK | 621 |
| | | MmLRP | | | YS | | Q | | I | | FSYTR | | RFAGM | |
| | | 5-his | | | | | | | | | | | | |

TABLE 4

| | | | binding antibodies CDRs | | | | | | | | | | | |
|---|---|---|---|---|---|---|---|---|---|---|---|---|---|---|
| | | | | SEQ | | SEQ | | SEQ | | SEQ | | SEQ | | SEQ |
| Antibody | LRP6-antibody | | | ID | | ID | | ID | | ID | | ID | | ID |
| ID | Library | Antigen | L1 | NO: | L2 | NO: | L3 | NO: | H1 | NO: | H2 | NO: | H3 | NO: |
| 2539 | F | LRP6-Fc | SVSSA | 1 | SASSLYS | 2 | YSWGPF | 622 | ISYSSI | 363 | YISSYYG | 51 | AHYFPWA | 813 |
| | | | | | | | | | | | YTY | | GAM | |
| 2542 | F | LRP6-Fc | SVSSA | 1 | SASSLYS | 2 | YYWPI | 623 | ISSYYI | 683 | SIYSSYG | 741 | TVRGSKK | 814 |
| | | | | | | | | | | | YTS | | PYFSGWA | |
| | | | | | | | | | | | | | M | |
| 2540 | F | LRP6-Fc | SVSSA | 1 | SASSLYS | 2 | YYFLI | 624 | ISYSSI | 363 | SISPYYG | 1742 | SSYFPWF | 815 |
| | | | | | | | | | | | YTY | | SAM | |
| 12612 | H | LRP6-Fc | SVSSA | 1 | SASDLYS | 491 | YRYYWRP | 625 | FSGDAM | 684 | RISSSGG | 743 | ASYYSNY | 816 |
| | | | | | | | I | | | | YTA | | YYGPAM | |
| 12613 | H | LRP6-Fc | SVSSA | 1 | SASDLYS | 491 | GPWGLI | 626 | ISGAWM | 685 | RIYPSGG | 744 | GWFSFRS | 817 |
| | | | | | | | | | | | TTD | | YYRSYYY | |
| | | | | | | | | | | | | | YSAL | |
| 12614 | H | LRP6-Fc | SVSSA | 1 | SASDLYS | 491 | RYSSPI | 627 | FTTYSI | 686 | GISTSGG | 745 | SGHPRYY | 818 |
| | | | | | | | | | | | YTD | | SRRHSYG | |
| | | | | | | | | | | | | | M | |
| 12615 | H | LRP6-Fc | SVSSA | 1 | SASDLYS | 491 | YRYWYGP | 628 | FAASGI | 687 | YISPSGG | 746 | SYYSNYY | 819 |
| | | | | | | | I | | | | YTD | | YYYDAM | |
| 12979 | 2539AM | LRP6-Fc | SVSSA | 1 | SASSLYS | 2 | YSWALF | 629 | IFFSSM | 688 | GISSYYG | 747 | AHYFPWA | 820 |
| | | | | | | | | | | | FTY | | GAL | |
| 12980 | 2539AM | LRP6-Fc | SVSSA | 1 | SASSLYS | 2 | ISWGLI | 630 | IRYSSI | 689 | GIFSNYG | 748 | AHYFRRA | 821 |
| | | | | | | | | | | | PTT | | RGL | |
| 12981 | 2539AM | LRP6-Fc | SVSSA | 1 | SASSLYS | 2 | YFSYPI | 631 | LSYSSI | 344 | FISSYYS | 749 | SHYFPWA | 822 |
| | | | | | | | | | | | FTH | | GAM | |
| 12982 | 2539AM | LRP6-Fc | SVSSA | 1 | SASSLYS | 2 | YRWALF | 632 | LAYSSI | 690 | SISSYYG | 750 | AHYFPWA | 823 |
| | | | | | | | | | | | FTY | | GGM | |
| 12983 | 2539AM | LRP6-Fc | SVSSA | 1 | SASSLYS | 2 | YSRILF | 633 | LRYASM | 691 | YIASFYG | 751 | SYYYPRS | 824 |
| | | | | | | | | | | | DTY | | RGM | |
| 12984 | 2539AM | LRP6-Fc | SVSSA | 1 | SASSLYS | 2 | YSLRPI | 634 | LSFSSI | 370 | HISPYYG | 752 | SHYFPWA | 825 |
| | | | | | | | | | | | YTH | | VAM | |
| 12985 | 2539AM | LRP6-Fc | SVSSA | 1 | SASSLYS | 2 | YSRGLI | 635 | IFYSSI | 692 | YISSYYS | 58 | SHYFPWA | 825 |
| | | | | | | | | | | | YTY | | VAM | |
| 12986 | 2539AM | LRP6-Fc | SVSSA | 1 | SASSLYS | 2 | YFWGLI | 636 | LSYSSM | 364 | NITPYYG | 753 | SHYFPWF | 826 |
| | | | | | | | | | | | YTS | | AAM | |
| 12987 | 2539AM | LRP6-Fc | SVSSA | 1 | SASSLYS | 2 | YSWGLI | 637 | INYSSI | 693 | GISSYYS | 754 | ANYFPWA | 827 |
| | | | | | | | | | | | YTY | | YAM | |
| 12988 | 2539AM | LRP6-Fc | SVSSA | 1 | SASSLYS | 2 | DSWGLF | 638 | ISYSSM | 358 | LITSYYG | 755 | AHYFPWV | 828 |
| | | | | | | | | | | | YTT | | VGM | |
| 12989 | 2539AM | LRP6-Fc | SVSSA | 1 | SASSLYS | 2 | YYWGLI | 639 | LSYSSI | 344 | FISSYYG | 73 | SHYFPWA | 829 |
| | | | | | | | | | | | YTY | | GAL | |
| 13002 | 2540AM | LRP6-Fc | SVSSA | 1 | SASSLYS | 2 | YYYLI | 640 | IAFSSI | 694 | SISSYYG | 555 | SSYFPWF | 830 |
| | | | | | | | | | | | YTS | | SAL | |
| 13003 | 2540AM | LRP6-Fc | SVSSA | 1 | SASSLYS | 2 | YYILI | 641 | LFYSSM | 695 | FISPYYS | 756 | SSYFPWL | 831 |
| | | | | | | | | | | | FTN | | SDM | |
| 13004 | 2540AM | LRP6-Fc | SVSSA | 1 | SASSLYS | 2 | HSFPI | 642 | ISYSSM | 358 | NITSYYG | 757 | SSYFPWV | 832 |
| | | | | | | | | | | | YTT | | SGM | |
| 13005 | 2540AM | LRP6-Fc | SVSSA | 1 | SASSLYS | 2 | YHHLI | 643 | ISFASM | 696 | SISPYYS | 758 | SSYFPWF | 815 |
| | | | | | | | | | | | YTS | | SAM | |
| 13006 | 2540AM | LRP6-Fc | SVSSA | 1 | SASSLYS | 2 | YYSPI | 644 | IFYSSI | 692 | SISPYYG | 759 | SSYLPWF | 833 |
| | | | | | | | | | | | YTD | | SAL | |
| 13007 | 2540AM | LRP6-Fc | SVSSA | 1 | SASSLYS | 2 | YYYPI | 645 | ISFYSI | 697 | SISSYYS | 760 | SSYFPWF | 834 |
| | | | | | | | | | | | YTD | | TAL | |
| 13008 | 2540AM | LRP6-Fc | SVSSA | 1 | SASSLYS | 2 | YHFLI | 646 | ISYSSI | 363 | AIYSYYS | 761 | SSYFPWV | 835 |
| | | | | | | | | | | | YTI | | GGF | |
| 13009 | 2540AM | LRP6-Fc | SVSSA | 1 | SASSLYS | 2 | YYFPI | 647 | LSYSSI | 344 | SISPYYS | 758 | SSRFPWF | 836 |
| | | | | | | | | | | | YTS | | YGL | |
| 13010 | 2540AM | LRP6-Fc | SVSSA | 1 | SASSLYS | 2 | YDFLI | 648 | ISYSSM | 358 | SISSYYG | 555 | SSYFPWF | 830 |
| | | | | | | | | | | | YTS | | SAL | |
| 13394 | 2540AM | LRP6-Fc | SVSSA | 1 | SASSLYS | 2 | YYILI | 641 | LFYASM | 598 | SISSYYG | 555 | SSYFPWF | 815 |
| | | | | | | | | | | | YTS | | SAM | |
| 13395 | 2540AM | LRP6-Fc | SVSSA | 1 | SASSLYS | 2 | YYYLI | 640 | ISYSSI | 363 | SISPYYG | 762 | SSYFPWF | 815 |
| | | | | | | | | | | | FTL | | SAM | |
| 13396 | 2540AM | LRP6-Fc | SVSSA | 1 | SASSLYS | 2 | YYFPI | 647 | IAYASI | 699 | SISSYYS | 763 | SSYFPWF | 815 |
| | | | | | | | | | | | YTY | | SAM | |
| 13397 | 2540AM | LRP6-Fc | SVSSA | 1 | SASSLYS | 2 | YYFPI | 647 | ITYSSI | 361 | SISSYYG | 764 | SSYFPWS | 837 |
| | | | | | | | | | | | YTA | | SAM | |
| 13398 | 2540AM | LRP6-Fc | SVSSA | 1 | SASSLYS | 2 | NSFLI | 649 | ISRSSI | 700 | GISSYYG | 765 | SHYFPWL | 838 |
| | | | | | | | | | | | YTR | | SAL | |
| 13399 | 2540AM | LRP6-Fc | SVSSA | 1 | SASSLYS | 2 | YYNPI | 650 | ISYASI | 701 | SISPYYG | 766 | ASYYPWF | 839 |
| | | | | | | | | | | | YTR | | SAM | |
| 13400 | 2540AM | LRP6-Fc | SVSSA | 1 | SASSLYS | 2 | YGFLI | 651 | LDYSSI | 702 | SISPYYS | 767 | SSYIPWR | 840 |
| | | | | | | | | | | | YTT | | YAI | |
| 13401 | 2540AM | LRP6-Fc | SVSSA | 1 | SASSLYS | 2 | YYFLI | 624 | ISYSSI | 363 | SISPYYS | 74 | SSYFPWI | 841 |
| | | | | | | | | | | | YTN | | SAM | |
| 13402 | 2540AM | LRP6-Fc | SVSSA | 1 | SASSLYS | 2 | YYFPI | 647 | IYYYSM | 530 | GISSYYS | 768 | SSYFPWI | 842 |
| | | | | | | | | | | | YTS | | SAL | |
| 13403 | 2540AM | LRP6-Fc | SVSSA | 1 | SASSLYS | 2 | YYFPI | 647 | ISYSSM | 358 | SISPYYS | 769 | SSRFPWI | 843 |
| | | | | | | | | | | | FTS | | SGM | |
| 13404 | 2540AM | LRP6-Fc | SVSSA | 1 | SASSLYS | 2 | YNFLI | 652 | ISYSSI | 363 | SISSYYG | 68 | SSYFPWF | 830 |
| | | | | | | | | | | | FTS | | SAL | |
| 13405 | 2540AM | LRP6-Fc | SVSSA | 1 | SASSLYS | 2 | YYFPI | 647 | ISYSSI | 363 | SISSYYG | 68 | SPYFPWS | 844 |
| | | | | | | | | | | | FTS | | SAL | |
| 13406 | 2540AM | LRP6-Fc | SVSSA | 1 | SASSLYS | 2 | YYFPI | 647 | LSYSAI | 703 | YISPYYG | 65 | ASYLPWF | 845 |
| | | | | | | | | | | | YTY | | SAM | |
| 13407 | 2540AM | LRP6-Fc | SVSSA | 1 | SASSLYS | 2 | SSFLI | 653 | LSGFGI | 704 | FISSYYG | 770 | SSYLPWI | 846 |
| | | | | | | | | | | | YTA | | TAM | |
| 13408 | 2540AM | LRP6-Fc | SVSSA | 1 | SASSLYS | 2 | YVFLI | 654 | LSFASM | 705 | SISSYYG | 771 | SAYFPWF | 847 |
| | | | | | | | | | | | YTP | | AAL | |
| 13409 | 2540AM | LRP6-Fc | SVSSA | 1 | SASSLYS | 2 | YYFPI | 647 | LAYNSI | 706 | SIFSYYS | 772 | SSYFPWF | 815 |
| | | | | | | | | | | | YTN | | SAM | |
| 13410 | 2540AM | LRP6-Fc | SVSSA | 1 | SASSLYS | 2 | FYGPI | 655 | ISFSSI | 357 | SISSYYG | 773 | SSYFPWF | 848 |
| | | | | | | | | | | | YTL | | FAM | |
| 13411 | 2540AM | LRP6-Fc | SVSSA | 1 | SASSLYS | 2 | YFFLI | 656 | LYYSNI | 707 | YISSYYG | 774 | SSYFPWF | 830 |
| | | | | | | | | | | | YTS | | SAL | |
| 13412 | 2540AM | LRP6-Fc | SVSSA | 1 | SASSLYS | 2 | YYGPI | 657 | IHYYSI | 708 | SISPYYS | 775 | SSYFPWF | 815 |
| | | | | | | | | | | | FTD | | SAM | |
| 13413 | 2540AM | LRP6-Fc | SVSSA | 1 | SASSLYS | 2 | YDFLI | 648 | ISFASI | 709 | SIYSYYS | 776 | SSHFPWV | 849 |
| | | | | | | | | | | | FTN | | SAL | |
| 13414 | 2540AM | LRP6-Fc | SVSSA | 1 | SASSLYS | 2 | YYSPI | 644 | IYYSSM | 378 | SISPYYG | 557 | SSYFPWV | 850 |
| | | | | | | | | | | | YTS | | SAM | |
| 13415 | 2540AM | LRP6-Fc | SVSSA | 1 | SASSLYS | 2 | YYFLI | 624 | LSYFSM | 710 | SIYSYYG | 777 | SSHFPWF | 851 |
| | | | | | | | | | | | FTN | | SAM | |
| 13422 | 2540AM | LRP6-Fc | SVSSA | 1 | SASSLYS | 2 | FYGPI | 655 | LFYSSM | 695 | TISPYYG | 778 | SSYFPWF | 830 |
| | | | | | | | | | | | YTS | | SAL | |
| 13428 | 2540AM | LRP6-Fc | SVSSA | 1 | SASSLYS | 2 | YTLPI | 658 | ISFSSM | 380 | HISSYYG | 779 | SSYFPWF | 830 |
| | | | | | | | | | | | FTS | | SAL | |
| 13430 | 2540AM | LRP6-Fc | SVSSA | 1 | SASSLYS | 2 | YRFPI | 659 | ISYFSI | 711 | SISPYYS | 74 | SSYFPWF | 852 |
| | | | | | | | | | | | YTN | | SAI | |
| 13431 | 2540AM | LRP6-Fc | SVSSA | 1 | SASSLYS | 2 | YHLLI | 660 | LYYNSI | 712 | AIHPYYG | 780 | SSRFPWF | 853 |
| | | | | | | | | | | | YTS | | PAM | |
| 13432 | 2540AM | LRP6-Fc | SVSSA | 1 | SASSLYS | 2 | YSFPI | 661 | LSYASI | 713 | SISSYYG | 781 | SSYFPWF | 815 |
| | | | | | | | | | | | YTG | | SAM | |
| 13435 | 2540AM | LRP6-Fc | SVSSA | 1 | SASSLYS | 2 | YFLPI | 662 | LSYSSM | 364 | SISPYYG | 782 | SSYFPWF | 830 |
| | | | | | | | | | | | FTY | | SAL | |
| 13436 | 2540AM | LRP6-Fc | SVSSA | 1 | SASSLYS | 2 | YYFPI | 647 | ISYASM | 714 | SISSYYG | 783 | SSYVPWF | 854 |
| | | | | | | | | | | | YTD | | YAL | |
| 13437 | 2540AM | LRP6-Fc | SVSSA | 1 | SASSLYS | 2 | YDNLI | 663 | ITYSSI | 361 | SISSYYG | 68 | SSYFPWF | 815 |
| | | | | | | | | | | | FTS | | SAM | |
| 13438 | 2540AM | LRP6-Fc | SVSSA | 1 | SASSLYS | 2 | YLFPI | 664 | ISYYSI | 715 | SIYSYYG | 784 | ASYFPWF | 855 |
| | | | | | | | | | | | YTT | | PAM | |
| 13439 | 2540AM | LRP6-Fc | SVSSA | 1 | SASSLYS | 2 | YFFPI | 665 | LSHSSI | 716 | SISSHYG | 785 | SSYFPWF | 856 |
| | | | | | | | | | | | YTH | | FAL | |
| 13440 | 2540AM | LRP6-Fc | SVSSA | 1 | SASSLYS | 2 | YYIPI | 666 | IAYNSM | 717 | SISSYYS | 760 | SSYFPWF | 830 |
| | | | | | | | | | | | YTD | | SAL | |
| 13441 | 2540AM | LRP6-Fc | SVSSA | 1 | SASSLYS | 2 | FNFLI | 667 | LSYSSI | 344 | YISSYYG | 786 | SSYYPWF | 857 |
| | | | | | | | | | | | YTA | | SAL | |
| 13442 | 2540AM | LRP6-Fc | SVSSA | 1 | SASSLYS | 2 | YNYLI | 668 | LAYSSI | 690 | SISSYYG | 787 | SSYLPWV | 858 |
| | | | | | | | | | | | YTY | | SAL | |
| 12990 | 2542AM | LRP6-Fc | SVSSA | 1 | SASSLYS | 2 | YYWPI | 623 | ISLFFM | 718 | SIYSSYS | 788 | SFNGAKK | 859 |
| | | | | | | | | | | | YTS | | PYFSGWA | |
| | | | | | | | | | | | | | M | |
| 12991 | 2542AM | LRP6-Fc | SVSSA | 1 | SASSLYS | 2 | YYWPI | 623 | IPSYFM | 719 | SIYSSYS | 789 | NVVVSRK | 860 |
| | | | | | | | | | | | YTA | | PYFFRSA | |
| | | | | | | | | | | | | | M | |
| 12992 | 2542AM | LRP6-Fc | SVSSA | 1 | SASSLYS | 2 | YYWPI | 623 | ISSSYM | 348 | SIYSSYS | 790 | TVPGSKR | 861 |
| | | | | | | | | | | | YTG | | PYFASLA | |
| | | | | | | | | | | | | | I | |
| 12993 | 2542AM | LRP6-Fc | SVSSA | 1 | SASSLYS | 2 | YYWPI | 623 | ISSYFI | 720 | SIYPSYS | 791 | NVRGFRK | 862 |
| | | | | | | | | | | | YTS | | PYFSRWA | |
| | | | | | | | | | | | | | M | |
| 12994 | 2542AM | LRP6-Fc | SVSSA | 1 | SASSLYS | 2 | YYWPI | 623 | LSSYYM | 721 | SIYSRFS | 792 | NVPGIKR | 863 |
| | | | | | | | | | | | YTA | | PYFTAWA | |
| | | | | | | | | | | | | | M | |
| 12995 | 2542AM | LRP6-Fc | SVSSA | 1 | SASSLYS | 2 | SYWPI | 669 | LHSYYI | 722 | NIYSSYG | 793 | TIRGSKR | 864 |
| | | | | | | | | | | | YTS | | PYFAASG | |
| | | | | | | | | | | | | | L | |
| 12996 | 2542AM | LRP6-Fc | SVSSA | 1 | SASSLYS | 2 | YYWPI | 623 | LSSYYM | 721 | SIYSSYS | 788 | TARENKK | 865 |
| | | | | | | | | | | | YTS | | PYFSGWA | |
| | | | | | | | | | | | | | M | |
| 12997 | 2542AM | LRP6-Fc | SVSSA | 1 | SASSLYS | 2 | YYRPI | 670 | IGSYYM | 723 | AIYSPYG | 794 | TLPLSKK | 866 |
| | | | | | | | | | | | YTS | | PYFSLWA | |
| | | | | | | | | | | | | | F | |
| 12998 | 2542AM | LRP6-Fc | SVSSA | 1 | SASSLYS | 2 | YYWPI | 623 | LGSYYI | 724 | TIYSYYS | 795 | TFHGSKK | 867 |
| | | | | | | | | | | | YTS | | PYFSGRA | |
| | | | | | | | | | | | | | M | |
| 12999 | 2542AM | LRP6-Fc | SVSSA | 1 | SASSLYS | 2 | YYWPI | 623 | LTSYYI | 725 | SIYPSYS | 791 | SIRGSKK | 868 |
| | | | | | | | | | | | YTS | | PYFSRLA | |
| | | | | | | | | | | | | | L | |
| 13000 | 2542AM | LRP6-Fc | SVSSA | 1 | SASSLYS | 2 | YYWPI | 623 | ISTYYM | 726 | SIYPSYS | 791 | SVRGSKK | 869 |
| | | | | | | | | | | | YTS | | PYFSHWA | |
| | | | | | | | | | | | | | M | |
| 13001 | 2542AM | LRP6-Fc | SVSSA | 1 | SASSLYS | 2 | YYWPI | 623 | ISSNYI | 548 | SIYSSFG | 796 | NVRTSKK | 870 |
| | | | | | | | | | | | YTS | | PYFPLWA | |
| | | | | | | | | | | | | | M | |
| 13011 | 2460AM | LRP6-Fc | SVSSA | 1 | SASSLYS | 2 | ASNNLI | 671 | IPLYTI | 727 | SISPSYS | 797 | GVSGGSN | 871 |
| | | | | | | | | | | | YTY | | YISIFRN | |
| | | | | | | | | | | | | | SSGM | |
| 13012 | 2460AM | LRP6-Fc | SVSSA | 1 | SASSLYS | 2 | SSYSLI | 130 | IFSTSI | 728 | SITSAYS | 798 | GGLSVSH | 872 |
| | | | | | | | | | | | YTY | | YNYVHSF | |
| | | | | | | | | | | | | | KWGL | |
| 13013 | 2460AM | LRP6-Fc | SVSSA | 1 | SASSLYS | 2 | SAITPI | 672 | ISYSTM | 729 | SIVSSYS | 799 | SCSSFCN | 873 |
| | | | | | | | | | | | RTY | | YVSNYNA | |
| | | | | | | | | | | | | | RRAL | |
| 13014 | 2460AM | LRP6-Fc | SVSSA | 1 | SASSLYS | 2 | FSYSPF | 673 | LSSSGM | 730 | AIYPFDG | 800 | GNARVSN | 874 |
| | | | | | | | | | | | YTY | | YISSYYA | |
| | | | | | | | | | | | | | WRAM | |
| 13015 | 2460AM | LRP6-Fc | SVSSA | 1 | SASSLYS | 2 | SSYNLI | 674 | FSSSSI | 528 | GIFSYFS | 801 | GGYGFSY | 875 |
| | | | | | | | | | | | YTY | | YNSVTFY | |
| | | | | | | | | | | | | | RWAF | |
| 13016 | 2460AM | LRP6-Fc | SVSSA | 1 | SASSLYS | 2 | SYNFPF | 675 | IRGPSI | 731 | SISPFCG | 802 | VGSGVCN | 876 |
| | | | | | | | | | | | FTY | | SLHNYFY | |
| | | | | | | | | | | | | | KRGM | |
| 13017 | 2460AM | LRP6-Fc | SVSSA | 1 | SASSLYS | 2 | SSTVPF | 676 | FSSTYM | 732 | SITPSYG | 803 | SSSDISI | 877 |
| | | | | | | | | | | | YTN | | DNSIRYT | |
| | | | | | | | | | | | | | WGAM | |
| 13018 | 2460AM | LRP6-Fc | SVSSA | 1 | SASSLYS | 2 | SSYSLI | 130 | INSSFM | 733 | SISPSYG | 804 | GHSGVTN | 878 |
| | | | | | | | | | | | YTY | | FISFYYR | |
| | | | | | | | | | | | | | RRAM | |
| 13019 | 2460AM | LRP6-Fc | SVSSA | 1 | SASSLYS | 2 | SNYSLF | 677 | IFGYSM | 734 | SIFPCCS | 805 | GVSGLDN | 879 |
| | | | | | | | | | | | NTY | | NRTASYS | |
| | | | | | | | | | | | | | RMGM | |
| 13020 | 2460AM | LRP6-Fc | SVSSA | 1 | SASSLYS | 2 | STYSLI | 678 | FSSSTI | 735 | SIAPSFG | 806 | GAASVNH | 880 |
| | | | | | | | | | | | HTY | | IGSLYVS | |
| | | | | | | | | | | | | | WRGL | |
| 13021 | 2460AM | LRP6-Fc | SVSSA | 1 | SASSLYS | 2 | SAFSLI | 679 | LSSSTM | 736 | SISPYYS | 807 | HGSGLSH | 881 |
| | | | | | | | | | | | YTR | | NATTSYY | |
| | | | | | | | | | | | | | RSAI | |
| 13022 | 2460AM | LRP6-Fc | SVSSA | 1 | SASSLYS | 2 | SSYSLI | 130 | ISYTSI | 737 | SIFSTYS | 808 | SSSAVSR | 882 |
| | | | | | | | | | | | YTY | | NSIVYYS | |
| | | | | | | | | | | | | | RTAM | |
| 13023 | 2460AM | LRP6-Fc | SVSSA | 1 | SASSLYS | 2 | SSYTPI | 680 | FSSSVM | 738 | SIAPSYS | 809 | GVCRVSN | 883 |
| | | | | | | | | | | | FTY | | YSSYFYS | |
| | | | | | | | | | | | | | RGAM | |
| 13024 | 2460AM | LRP6-Fc | SVSSA | 1 | SASSLYS | 2 | YSNSLI | 681 | SYSTM | 729 | SITPYYS | 810 | AISHVAH | 884 |
| | | | | | | | | | | | TTS | | YDNVIYS | |
| | | | | | | | | | | | | | KWGI | |
| 13025 | 2460AM | LRP6-Fc | SVSSA | 1 | SASSLYS | 2 | SSYSLI | 130 | IASYSM | 739 | FISPYHS | 811 | GHSVLSN | 885 |
| | | | | | | | | | | | YTD | | YVSIHYY | |
| | | | | | | | | | | | | | WAGF | |
| 13026 | 8716AM | LRP6-Fc | SVSSA | 1 | SASSLYS | 2 | YWAYFSP | 682 | FSYSSM | 740 | SISSRYG | 812 | SWAM | 586 |
| | | | | | | | I | | | | YTY | | | |

### Example 3: Tetravalent Binding Antibody Molecule Formats

[0177] A. We generated various formats of tetravalent binding antibody molecules comprising pan-FZD and LRP5/6 antibody fragments, e.g., scFv, diabodies and Fab, on either end of an Fc domain, see Table 5 and FIG. 6, and assayed their Wnt agonist activity. DNA fragments encoding antibody variable domains were either amplified by PCR from phagemid DNA template or were constructed by chemical synthesis (Twist Biosciences). The DNA fragments were cloned into mammalian expression vectors (pSCSTa). Bispecific diabodies and IgGs contained an optimized version of a “knobs-in-holes” heterodimeric Fc (Ridgway et al. Protein Eng. 9, 617-621 (1996)). Diabody domains were arranged in a VH-VL orientation with the variable domains separated by a short GGGGS linker (SEQ ID NO: 886), which favors intermolecular association between VH and VL domains and thus favors diabody formation. To produce diabody fusion constructs, the diabody chains were fused to human IgG1 Fc. Diabody-fc-diabody proteins were constructed as VH-x-VL-y-[human IgG1 Fc]-z-VH-x-VL where linkers are x=GGGGS (SEQ ID NO: 886), y=LEDKTHTKVEPKSS (SEQ ID NO: 887), and Z=SGSETPGTSESATPESGGG (SEQ ID NO: 888). In this format, the human IgG1 Fc or knob-in-hole IgG1 Fc fragments spanned from position 234-478 (Kabat numbering). For scFv-Fc fusions, the variable domains were arranged in a VL-VH orientation and were connected by a long GTTAASGSSGGSSSGA linker (SEQ ID NO: 889), which favors intramolecular association between VH and VL domains and thus favors scFv formation. Variants with a Fab domain fused to the C-terminus of the Fc were generated via chemical synthesis (Twist Biosciences). For all constructs, the entire coding region was cloned into a mammalian expression vector in frame with the secretion signal peptide.

[0178] These various of tetravalent binding antibody molecules comprising pan-specific FZD and LRP5/6 antibody fragments were tested in a TOPFLASH assay to monitor beta catenin-mediated gene reporter activity. Proteins were compared against the native ligand Wnt3a. Assays were performed by plating TOPFLASH cells to ˜70% confluency in a 96-well tissue culture treated plate. Agonists were diluted in DMEM to provide a final assay concentration of 0.046 nM-100 nM and cells were treated overnight at 37° C. under 5% CO₂. Luciferase expression was quantified using the Dual-Luciferase Reporter Assay System (Promega) in 96-well black plates in accordance with the manufacturer's instructions. Briefly, HEK293T cells were transduced with lentivirus coding for the pBARIs reporter (Biechele and Moon in Wnt Signaling: Pathway Methods and Mammalian Models, E. Vincan, Ed. (Humana Press, Totowa, NJ, 2008), pp. 99-110) and with Renilla Luciferase as a control to generate a Wnt-βcatenin signaling reporter cell line. 1-2×10³ cells in 120 μl were seeded in each well of 96-well plates for 24 hours prior to transfection or stimulation. The following day, FZD Agonists or Ab protein was added, and following 15-20 hours of stimulation, cells were lysed and luminescence was measured in accordance with the dual luciferase protocol (Promega) using an Envision plate reader (PerkinElmer). For the FZD4 Agonist assay, FZD4 cDNA was transfected for 6 hours prior to adding the FZD Agonist. For the Wnt inhibition assays, Wnt1 was introduced by cDNA transfection or WNT3A protein was applied for 6 hours prior to the addition of Ab protein. All assays were repeated at least three times. The results are presented in Table 5. As shown in Table 5, each of the tetravalent formats activate FZD signaling to differing degrees when clustering FZD4 and LRP5. These formats were also evaluated for stability, homogeneity and yield production from Expi293 (FIGS. 3 and 9). From these analyses, the Diabody-Fc-Fab format provides the best balance of activity, expression, stability. Finally, we applied the same modality arrangement for FZD5 and LRP6 and we observed potent agonist activity. The results in Table 5 show that the various tetravalent modalities elicit WNT agonism and that engagement of 2 LRP5/6 epitopes produces WNT signaling activity (maxima) higher than with 1 LRP5/6 epitope.

TABLE 5

| | | | Binding | | | | |
|---|---|---|---|---|---|---|---|
| | | | specificity | Topflash | | % Wnt | |
| | Modality | | (Paratope | EC50 (nM) | | Maxima | |
| Molecule | Recombinantly | Paratopes | Stoichiometry) | Avg Stdev | | Avg Stdev | |
| Wnt3a | produced ligand | NA | FZD/LRP | 6 | 3 | 100% | ND |
| CM0011 | FZD Diabody- | 5019 (FZD Diabody); | FZD1/2/4/5/7/8, | 0.3 | 0.1 | 63% | 10% |
| | Fc-LRP Diabody | 2539, 2542 (LRP diabody) | LRP6¹, LRP6³ (2:1:1) | | | | |
| ANT-4 | FZD Diabody- | 5016(FZD Diabody); | FZD1/2/4/5/7/8, | 0.5 | 0.1 | 63% | 6% |
| | Fc-LRP Fab | 2540, 2542 (LRP Fab) | LRP6¹, LRP6³ (2:1:1) | | | | |
| ANT-5 | FZD Diabody- | 5016(FZD Diabody); | FZD1/2/4/5/7/8, | 0.5 | 0.1 | 59% | 8% |
| | Fc-LRP Fab | 2540, 2542 (LRP Fab) | LRP6¹, LRP6³ (2:1:1) | | | | |
| CT0001 | FZD IgG-LRP | 5016(FZD IgG); 2539, | FZD1/2/4/5/7/8, | 0.3 | 0.1 | 57% | 17% |
| | Diabody | 2542 (LRP Diabody) | LRP6¹, LRP6³ (2:1:1) | | | | |
| CT0002 | LRP Diabody-Fc- | 2539, 2542 (LRP Diabody); | FZD1/2/4/5/7/8, | 0.5 | 0.1 | 55% | 22% |
| | FZD scFv (VL-VH) | 5016 (FZD scFv) | LRP6¹, LRP6³ (2:1:1) | | | | |
| CM0126 | FZD Diabody- | 5016(FZD Diabody); | FZD1/2/4/5/7/8, | 0.3 | 0.2 | 52% | 1% |
| | Fc-LRP Diabody | 2539, 2542 (LRP Diabody) | LRP6¹, LRP6³ (2:1:1) | | | | |
| ANT-1 | LRP Diabody- | 2540, 2542 (LRP Diabody); | FZD1/2/4/5/7/8, | 0.7 | 0.5 | 49% | 22% |
| | Fc-FZD Fab | 5016 (FZD Fab) | LRP6¹, LRP6³ (2:1:1) | | | | |
| CT0003 | FZD Diabody- | 5016 (FZD Diabody); | FZD1/2/4/5/7/8, | 0.4 | 0.1 | 42% | 16% |
| | Fc-LRP scFv | 2539, 2542 (LRP scFv) | LRP6¹, LRP6¹ (2:1:1) | | | | |
| ANT-2 | LRP Diabody- | 2540, 2542(LRP Diabody); | FZD1/2/4/5/7/8, | 0.3 | 0.1 | 38% | 25% |
| | Fc-FZD Fab | 5016(FZD Fab) | LRP6¹, LRP6³ (2:1:1) | | | | |
| CM0042 | FZD Diabody- | 5019(FZD Diabody); | FZD1/2/4/5/7/8, | 0.9 | 0.8 | 33% | 22% |
| | Fc-LRP Diabody | 2539 (LRP Diabody) | LRP6³ (2:2) | | | | |
| CM0302 | FZD IgG-LRP | 5056(FZD IgG)- | FZD1/2/4/5/7/8/10, | 0.3 | 0.2 | 18% | 8% |
| | Diabody | 2539(LRP Diabody) | LRP6³ (2:2) | | | | |
| CM0303 | FZD IgG-LRP | 5056(FZD IgG); | FZD1/2/4/5/7/8/10, | 3.7 | 2.1 | 17% | 13% |
| | scFv | 2539(LRP scFv) | LRP6³ (2:2) | | | | |
| CM0299 | FZD IgG-LRP | 5016(FZD IgG)-, | FZD1/2/4/5/7/8, | 0.1 | 0.1 | 14% | 5% |
| | Diabody | 2539(LRP Diabody) | LRP6³ (2:2) | | | | |

| | | | Binding | | | | |
|---|---|---|---|---|---|---|---|
| | | | specificity | Topflash | | % Wnt | |
| | Modality | | (Paratope | EC₅₀ (nM) | | Maxima | |
| Molecule | Recombinantly | Paratopes | Stoichiometry) | Avg Stdev | | Avg Stdev | |
| Wnt3a | produced ligand | NA | FZD/LRP | 6 | 3 | 100% | ND |
| CM0300 | FZD IgG-LRP scFv | 5016(FZD IgG)-, | FZD1/2/4/5/7/8, | 0.3 | 0.2 | 5% | 2% |
| | | 2539(LRP scFv) | LRP6³ (2:2) | | | | |
| CM0301 | FZD IgG-LRP scFv | 5016(FZD IgG)-, | FZD1/2/4/5/7/8, | 0.2 | 0.2 | 1% | 1% |
| | | 2542(LRP scFv) | LRP6¹ (2:2) | | | | |
| CM0156 | Diabody-Fc-Diabody | 4275 | no FZD/LRP binding | NA | NA | NA | NA |
| 4275 | IgG | 4275 | no FZD/LRP binding | NA | NA | NA | NA |

### B. Diabody-Fc-Fab Format FZD4 Agonists.

[0179] FZD Agonists having a bispecific LRP5-binding diabody and a FZD4 binding domain comprising FZD4-binding Fabs (FZD4 Agonists), a FZD5 binding domain comprising FZD5-binding Fabs (FZD5 Agonists), or a FZD binding domain that binds multiple FZD (pan-FZD Agonist) were generated using a knob-in-holes system. Briefly, the constructs were generated by chemical synthesis (Twist Biosciences) or by standard molecular biology techniques in a mammalian expression vector (pSCSTa). Diabody constructs were arranged in a VH-VL manner with a short (GGGGS (SEQ ID NO: 886)) linker linking the VH and VL to favor intermolecular pairing. For bispecific diabody arrangements, the variable domains for paratopes A and B, respectively, were arranged as VH(A)-VL(B) on the Hole Fc chain and VH(B)-VL(A) on the Knob Fc chain to facilitate proper paratope formation. Diabodies were fused to the N-terminus of an optimized knob-in-holes heterodimeric Fc (Ridgway et al. Protein Eng. 9, 617-621 (1996) via a GGGGSGGGGSEPKSS linker (SEQ ID NO: 890). The Fc region also contains the effector-null mutations D278A and N314G (Kabat numbering), corresponding to D655A/N297G (EU numbering). Fab domains were fused to the C-terminus of the heterodimeric Fc via a GGGSGGGSGGGSGGGSGSTG linker (SEQ ID NO: 891). Directly to this linker was fused the N-terminus of the Fab VH domain followed by CH1, terminating at T238 (Kabat numbering). This Fab pairs with a standard kappa light chain which was cloned as described above. For all constructs, the entire coding region was cloned into a mammalian expression vector in frame with the secretion signal peptide.

[0180] In addition, Diabody-fc-Fab formats were constructed as VH-x-VL-y-[human IgG1 Fc]-z-VH where linkers are x=GGGGS (SEQ ID NO: 886), y=GGGGSGGGGSEPKSSDKTHT (SEQ ID NO: 892), and z=GGGSGGGSGGGSGGGSGSTG (SEQ ID NO: 891). Diabody domains were arranged in a VH-VL orientation with the variable domains separated by a short GGGGS linker (SEQ ID NO: 886), which favors intermolecular association between VH and VL domains and thus favors diabody formation. Further, the Fc region may exhibit attenuated effector functions due amino acid mutations to N297G and D265A (DANG) variants or L234A, L235A, P331S (LALAPS) variants, and with the Fc region further comprising knob-in-hole heterodimerization variants Merrimack, Merchant or Merchant S:S.

[0181] FIG. 7 is an illustration of the Diabody-Fc-Fab format FZD4 Agonists having a LRP5 binding domain comprised of a diabody that is bivalent and bispecific for LRP5 and a FZD4 binding domain comprised of two FZD4 binding Fab fragments formed by a VL and CL1 of the light chain construct pairing with the VH and CH1 of each of the heavy chain hole and heavy chain knob constructs. Table 12 presents the amino acid sequences of heavy chains and light chains of FZD4 Agonists ANT's (Diabody-Fc-Fab format): the heavy chain knob construct (ANT16 knob), the heavy chain hole construct (ANT hole) and the light chain construct. The light chain and heavy chain variable CDRs are in bold underlined italics.

[0182] FIG. 16A depicts Diabody-Fc-Fab format FZD4 Agonists having Fc regions with attenuated effector functions due to amino acid mutations, e.g., N297G (NG) and D265A, (DANG) variants, and/or LALAPS variants, and with the Fc region further comprising knob-in-hole heterodimerization variants Merrimack, Merchant or Merchant S:S

### B. IgG-Diabody Format FZD4 Agonists.

[0183] FZD Agonists having two FZD-binding Fabs forming an N-terminal binding domain and a bispecific LRP5/6 binding diabody forming the C-terminal binding domain and an Fc domain were generated using a knob-in-holes system. IgG-Diabody proteins were constructed as VH-[human IgG1 Fc]-y-VH-x-VL where linkers are x=GGGGS (SEQ ID NO: 886) and y=GGGSGGGSGGGSGGGSGSTG (SEQ ID NO: 891).

[0184] FIG. 15 presents an illustration of the IgG-Diabody format FZD4 Agonists having an FZD binding domain comprising two Fab fragments attached to the N-terminus of the Fc domain with each Fab binding an FZD. The LRP5/6 co-receptor binding domain is attached to the C-terminus of the Fc domain and is composed of a diabody that binds two different sites on the co-receptor, e.g., a Wnt1 site (E1-E2) and a Wnt3 site (E3-E4) on LRP5/6. The Fabs may be specific for a particular FZD, e.g. FZD4, or may be pan-specific, binding to more than one FZD, e.g., to FZD4 and one or more other FZD.

[0185] FIG. 16B depicts IgG-Diabody FZD4 Agonists having Fc regions with attenuated effector functions due to amino acid mutations, e.g., N297G (NG) and D265A, (DANG) variants, and/or LALAPS variants, and with the Fc region further comprising knob-in-hole heterodimerization variants Merrimack, Merchant or Merchant S:S. Table 13 presents the amino acid sequences of heavy chains and light chains of FZD4 Agonist, ANT39 (Diabody-Fc-Fab format) and ANT39wi (IgG-Diabody format): the heavy chain knob construct (ANT39 and ANT39i knob), the heavy chain hole construct (ANT39 and ANT39i hole) and the light chain construct. Also included in Table 13 are amino acid sequences of heavy chains and light chains of FZD4 Agonist, ANT39 and ANT39i variants DANG, LALAPS, LALAPS Merchant and LALAPS Merchant S-S. The light chain and heavy chain variable CDRs are in bold underlined italics.

TABLE 6A

| | LRP5 Diabody Site 1 | | | | | | LRP5 Diabody Site 2 | | | | |
|---|---|---|---|---|---|---|---|---|---|---|---|
| | | | SEQ | | SEQ | | SEQ | | SEQ | | SEQ |
| | | | ID | [3] | ID | [4] | ID | [5] | ID | [6] | ID |
| Molecule | [1] | [2] | NO | CDR-H2 | NO | CDR-H3 | NO | CDR-L2 | NO | CDR-L3 | NO |
| ANT16-Hole | D | FSSSSI | 528 | SISSSYGYTY | 553 | SWAM | 586 | SASDLYS | 491 | YAGAGLI | 510 |
| ANT16-Knob | D | FTAYAM | 536 | SIYPSGGYTA | 566 | RSYYFAL | 603 | SASSLYS | 2 | YWAYYSPI | 493 |
| ANT18-Hole | N | LSYYYM | 527 | SIYSSYGYTY | 552 | WSHVSGHYSGM | 584 | SASSLYS | 2 | SSYSLI | 130 |
| ANT18-Knob | N | FSSSSI | 528 | SISSSYGYTY | 553 | GGSGVSHYGSV | 585 | SASSLYS | 2 | ASYAPI | 492 |
| | | | | | | YYSWWAL | | | | | |
| ANT20-Hole | N | LSYYYM | 527 | SIYSSYGYTY | 552 | WSHVSGHYSGM | 584 | SASDLYS | 491 | YAGAGLI | 510 |
| ANT20-Knob | D | FTAYAM | 536 | SIYPSGGYTA | 566 | RSYYFAL | 603 | SASSLYS | 2 | ASYAPI | 492 |
| ANT21-Hole | N | FSSSSI | 528 | SISSSYGYTY | 553 | SWAM | 586 | SASSLYS | 2 | SSYSLI | 130 |
| ANT21-Knob | N | FSSSSI | 528 | SISSSYGYTY | 553 | GGSGVSHYGSV | 585 | SASSLYS | 2 | YWAYYS | 493 |
| | | | | | | YYSWWAL | | | | PI | |
| ANT36-Hole | N | LSYYYM | 527 | SIYSSYGYTY | 552 | WSHVSGHYSGM | 584 | SASSLYS | 2 | SSYSLI | 130 |
| ANT36-Knob | N | FSSSSI | 528 | SISSSYGYTY | 553 | GGSGVSHYGSV | 585 | SASSLYS | 2 | ASYAPI | 492 |
| | | | | | | YYSWWAL | | | | | |
| ANT39-Hole | D | FSSSSI | 528 | SISSSYGYTY | 553 | SWAM | 586 | SASDLYS | 491 | YAGAGLI | 510 |
| ANT39-Knob | D | FTAYAM | 536 | SIYPSGGYTA | 566 | RSYYFAL | 603 | SASSLYS | 2 | YWAYYS | 493 |
| | | | | | | | | | | PI | |
| ANT42-Hole | D | FSSSSI | 528 | SISSSYGYTY | 553 | SWAM | 586 | SASDLYS | 491 | YAGAGLI | 510 |
| ANT42-Knob | D | FTAYAM | 536 | SIYPSGGYTA | 566 | RSYYFAL | 603 | SASSLYS | 2 | YWAYYSPI | 493 |

In all the molecules the LRP5 Diabody site 2 CDR-LI is SVSSA (SEQ ID NO: 1)

TABLE 6B

| | | FZD4 FAb | | | | | | | |
|---|---|---|---|---|---|---|---|---|---|
| | | | SEQ | | SEQ | | SEQ | | SEQ |
| | | [8] | ID | [9] | ID | [10] | ID | [11] | ID |
| Molecule | [7] | CDR-H1 | NO: | CDR-H2 | NO: | CDR-H3 | NO: | CDR-L3 | NO: |
| ANT16-Hole | T | LSSYSM | 24 | YISSYYGYTY | 51 | PAPGHWGF | 79 | WYYAPI | 3 |
| ANT16-Knob | T | LSSYSM | 24 | YISSYYGYTY | 51 | PAPGHWGF | 79 | WYYAPI | 3 |
| ANT18-Hole | T | LSSYSM | 24 | YISSYYGYTY | 51 | PAPGHWGF | 79 | WYYAPI | 3 |
| ANT18-Knob | T | LSSYSM | 24 | YISSYYGYTY | 51 | PAPGHWGF | 79 | WYYAPI | 3 |
| ANT20-Hole | T | LSSYSM | 24 | YISSYYGYTY | 51 | PAPGHWGF | 79 | WYYAPI | 3 |
| ANT20-Knob | T | LSSYSM | 24 | YISSYYGYTY | 51 | PAPGHWGF | 79 | WYYAPI | 3 |
| ANT21-Hole | T | LSSYSM | 24 | YISSYYGYTY | 51 | PAPGHWGF | 79 | WYYAPI | 3 |
| ANT21-Knob | T | LSSYSM | 24 | YISSYYGYTY | 51 | PAPGHWGF | 79 | WYYAPI | 3 |
| ANT36-Hole | T | LSSYSM | 24 | YISSYDSITD | 61 | PAVGHMAF | 90 | WYNAPI | 12 |
| ANT36-Knob | T | LSSYSM | 24 | YISSYDSITD | 61 | PAVGHMAF | 90 | WYNAPI | 12 |
| ANT39-Hole | T | LSSYSM | 24 | YISSYDSITD | 61 | PAVGHMAF | 90 | WYNAPI | 12 |
| ANT39-Knob | T | LSSYSM | 24 | YISSYDSITD | 61 | PAVGHMAF | 90 | WYNAPI | 12 |
| ANT42-Hole | T | SDFYFI | 164 | TIYPFIGNTY | 194 | AFPGSYHPF | 220 | STGSLI | 135 |
| ANT42-Knob | T | SDFYFI | 164 | TIYPFIGNTY | 194 | AFPGSYHPF | 220 | STGSLI | 135 |

In all the molecules the FZD FAB CDR-LI and CDR-L2 are respectively SVSSA (SEQ ID NO: 1) and SASSLYS (SEQ ID NO: 2)

TABLE 6C

| | LRP6 Diabody Site 1 | | | | | | LRP6 Diabody Site 2 | | | | |
|---|---|---|---|---|---|---|---|---|---|---|---|
| | | | SEQ | | SEQ | | SEQ | | SEQ | | SEQ |
| | | [2] | ID | [3] | ID | [4] | ID | [5] | ID | [6] | ID |
| Molecule | [1] | CDR-H1 | NO | CDR-H2 | NO | CDR-H3 | NO | CDR-L2 | NO | CDR-L3 | NO |
| ANT59- | D | ISSYFI | 720 | SIYPSY | 791 | NVRGFRKP | 862 | SASSLYS | 2 | YFFPI | 665 |
| Hole | | | | SYTS | | YFSRWAM | | | | | |
| ANT59- | D | LSHSSI | 716 | SISSHY | 785 | SSYFPWFF | 856 | SASSLYS | 2 | YYWPI | 623 |
| Knob | | | | GYTH | | AL | | | | | |
| ANT9- | D | ISSYFI | 720 | SIYPSY | 791 | NVRGFRKP | 862 | SASSLYS | 2 | YFFPI | 665 |
| Hole | | | | SYTS | | YFSRWAM | | | | | |
| ANT9- | D | LSHSSI | 716 | SISSHY | 785 | SSYFPWFF | 856 | SASSLYS | 2 | YYWPI | 623 |
| Knob | | | | GYTH | | AL | | | | | |

In all the molecules the CDR-LI of all LRP abs are SVSSA (SEQ ID NO: 1)

TABLE 6D

| | FZD Paratope | | | | | | | | | |
|---|---|---|---|---|---|---|---|---|---|---|
| | | | | SEQ | | SEQ | | SEQ | | SEQ |
| | FZD | | H1 (8) | ID | H2 (9) | ID | H3 (10) | ID | L3 (11) | ID |
| Molecule | Specificity | 7 | CDR-H1 | NO | CDR-H2 | NO | CDR-H3 | NO | CDR-L3 | NO |
| ANT59-Hole | 5 | N | IAYSSM | 365 | TIYPSYSSTY | 462 | YYAM | 484 | AHYFPI | 285 |
| ANT59-Knob | 5 | N | IAYSSM | 365 | TIYPSYSSTY | 462 | YYAM | 484 | AHYFPI | 285 |
| ANT9-Hole | 1, 2, 4, | N | IHSSSI | 893 | ATYSSFGSIT | 894 | YHHPFGYAL | 895 | GVYLF | 896 |
| | 5, 7, 8 | | | | | | | | | |
| ANT9-Knob | 1, 2, 4, | N | IHSSSI | 893 | ATYSSFGSIT | 894 | YHHPFGYAL | 895 | GVYLF | 896 |
| | 5, 7, 8 | | | | | | | | | |

In all molecules the CDR-L1 for FZD FAB are SVSSA (SEQ ID NO: 1) and CDR-L2 are SASSLYS (SEQ ID NO: 2)

C. FZD Agonists are Highly Specific for FZD4, Bind with High Specificity and are Stable in Solution.

[0186] Using biolayer interferometry (BLI) we have found that FZD4 Agonists described herein are highly specific for FZD4 over other FZD receptors. Recombinant FZD ECD proteins were immobilized on BLI sensors. The FZD4 Agonists in the Diabody-Fc-Fab format, having a LRP5 binding domain comprised of a diabody that is bivalent and bispecific for LRP5 and a FZD4 binding domain comprised of two FZD4 binding Fab fragments, were tested at a concentration of 100 nM in a buffer of PBS+0.05% Tween-20 and 1% BSA for binding to the ECD proteins. The results are presented in FIG. 8A. Controls in the assay included CM0199, a diabody-Fc-diabody format FZD agonist that recognizes FZD4 and LRP5 and Immunoglobulin 4275, which is an IgG that does not bind FZD or LRP.

[0187] The FZD4 Agonists also did not recognize common non-specific antigens. The FZD4 Agonists were tested at 100 nM for binding to a panel of antigens essentially as described in Monquet et al. “Polyreactivity increases the apparent affinity of anti-HIV antibodies by heteroligation” Nature 2010 Sep. 30; 467(7315):591-5(PMC3699875), and Jain et al., “Biophysical properties of the clinical-stage antibody landscape” Proc Natl Acad Sci 2017 Jan. 31; 114(5):944-949. (PMC5293111). Controls in the assay included CM0199, a diabody-Fc-diabody format FZD agonist that recognizes FZD4 and LRP5 and immunoglobulin 6606, which is an IgG that is particularly prone to non-specific binding in this assay. The results are presented in FIG. 8B.

[0188] The FZD4 Agonists comprising binding domains for FZD4 and LRP5 bind both FZD4 and LRP5 with high affinity. The apparent affinity of the FZD4 Agonists for recombinant ECD of FZD4 were determined by biolayer interferometry essentially as described in Elife. 2019 Aug. 27; 8: e46134. Briefly, BLI assays were performed using an Octet HTX instrument (ForteBio). For measuring binding to antigen, FZD-Fc proteins were captured on AHQ BLI sensors (18-5001, ForteBio) to achieve a BLI response of 0.6-1 nm and remaining Fc-binding sites were saturated with human Fc (009-000-008, Jackson ImmunoResearch). FZD-coated or control (Fc-coated) sensors were transferred into 100-0.1 nM tetravalent FZD agonist in assay buffer (PBS, 1% BSA, 0.05% Tween20) and association was monitored for 300 s. Sensors were then transferred into assay buffer and dissociation was monitored for an additional 300 s. Shake speed was 1000 rpm and temperature was 25° C. The results are presented in Table 7.

TABLE 7

| | FZD4 | LRP5 |
|---|---|---|
| Molecule | KD (nM) | EC50 (nM) |
| CM0199 | 0.7 | 7.5 |
| ANT16 | 0.6 | 1.4 |
| ANT18 | 2.6 | ND |
| ANT20 | 0.7 | ND |
| ANT21 | 2.2 | ND |
| ANT36 | <0.1* | ND |
| ANT39 | 0.3 | ND |

[0189] The FZD4 Agonists were also analyzed by SEC as compared to trastuzumab IgG. The results are presented in FIG. 9A and demonstrate that the diabody-Fc-Fab format Agonists are stable and homogenous in solution.

[0190] The FZD4 Agonists are also stable in solution. Purified FZD4 Agonists, ANT16, ANT18, ANT20, ANT21 and ANT 36 were resuspended to 1 mg/ml (except for ANT18, which was resuspended at 0.34 mg/ml) in 10 mM Histidine, 140 mM NaCl, 0.9% sucrose, pH 6 and stored either at 4° C. or 40° C. for a period of 6 days. Samples were removed at various time points, centrifuged to remove precipitated protein and residual protein concentration was measured. The results are presented in Tables 8 and 9.

TABLE 8

| | |
|---|---|
| Time at 40 | Soluble Protein Remaining (%) |

| degrees (days) | 0 | 1 | 2 | 6 |
|---|---|---|---|---|
| CM0199 | 100% | 60% | 64% | 40% |
| ANT-16 | 100% | 102% | 104% | 104% |
| ANT-18 | 100% | 92% | 83% | 105% |
| ANT-20 | 100% | 97% | 67% | 104% |
| ANT-21 | 100% | 102% | 75% | 102% |
| ANT-36 | 100% | 100% | 149% | 106% |

TABLE 9

| | |
|---|---|
| | Active Protein |
| Time at 40 | Remaining (%) |

| degrees (days) | 0 | 6 |
|---|---|---|
| CM0199 | 100% | 42% |
| ANT-16 | 100% | 34% |
| ANT-18 | 100% | 42% |
| ANT-20 | 100% | 30% |
| ANT-21 | 100% | 25% |

[0191] On Day 6, the amount of FZD4-specific binding sites remaining in the samples were quantified using BLI. Analysis by differential scanning fluorimetry showed that the FZD4 Agonists having a Diabody-Fc-Fab formats with an LRP-binding diabody on the N-terminal of the Fc domain and two FZD4-binding Fabs on the C-terminal of the Fc domain, have thermal denaturation profiles similar to that of Trastuzumab. IgGs generally display two peaks in a thermal stability assay, the first corresponding to CH2, the later to the Fab domain and CH3, see FIG. 9B.

[0192] The FZD4 Agonists were also assayed for induction of the beta-catenin target gene AXIN2 in a mouse endothelial cell line (bEND3.1) and were shown to induce transcription in a concentration dependent manner. These results are presented in FIG. 10.

TABLE 10

| Antibody | | Co-Receptor |
|---|---|---|
| No. | FZD recognized | recognized |
| 5019 | FZD1, FZD2, FZD4, FZD5, FZD7, FZD8 | |
| 5027 | FZD4 | |
| 5044 | FZD4 | |
| 5016 | FZD1, FZD2, FZD4, FZD5, FZD7, FZD8 | |
| 5056 | FZD1, FZD 2, FZD 4, FZD5, FZD7, FZD8, | |
| | FZD10 | |
| 2459 | | LRP5-W3 |
| 2460 | | LRP5-W1 |
| 8716 | | LRP5-W3 |
| 12600 | | LRP5-W1 |
| 12608 | | LPR5-W1 |
| 2539 | | LRP6-W3 |
| 2540 | | LRP6-W3 |
| 2542 | | LRP6-W1 |
| CM0199 | FZD4 | LRP5 |
| 6066 | N/A Positive control for non-specificity assay | |
| 4275 | no FZD/LRP binding | |

[0193] EXAMPLE 4. The FZD4 agonist was assayed for its ability to oppose the effect on cell junction disassembly and increased permeability mediated by VEGF, a cytokine released during tissue hypoxia. VEGF treatment of bEND3.1 cells leads to junction disassembly as seen by loss of plasma membrane staining of CLDN3, CLDN5 and ZO-1. Co-treatment of cells with VEGF and the FZD4 agonist leads to a near-complete rescue of this effect (FIG. 11). This decrease cell-cell junction stability mediated by VEGF treatment translates into increase endothelial cell permeability as monitor in a transendothelial permeability assay measuring the passage of 40-kDa FITC-dextran across a confluent endothelial monolayer of bEnd.3 grown on transwell filters. Co-treatment of cells with VEGF and the FZD4 agonist completely rescues that VEGF-mediated increase in cell permeability. These results indicate that the FZD4 agonist promotes endothelial cell barrier functions in a mechanism independent of VEGF.

[0194] A) Immunofluoresence of ZO-1 (green)/CLDN3 (red) and ZO-1 (green)/CLDN5 (red) localization on bEnd.3 cell junctions. bEnd.3 cells were treated or not with 30 nM of F4L5.13 (aka CM0199) and Norrin in the presence or absence of VEGF (100 ng/ml) for 1h. DAPI (blue) stain the nucleus. B) Transendothelial permeability was determined by measuring the passage of FITC-dextran through the bEnd.3 monolayer. Passage of FITC-dextran was measured after bEnd.3 treatment with VEGF (100 ng/ml) and F4L5.13 (30 nM) alone or simultaneously or upon pre-treatment with VEGF for 1h followed by F4L5.13 treatment for 1h. Error bar indicate SEM, n=5. The results are presented in FIG. 11.

### Example 5. New FZD5 Antibodies Bind FZD5 at a Site Overlapping with 2919 Identified from Affinity Maturation Libraries

[0195] Single point ELISAs were performed on 96-well Maxisorp plates coated with the ECDs of human FZD5 protein in the presence or absence of a saturating concentration of 2919 IgG. The plates were incubated with the monoclonal Fab-phage followed by incubation with horseradish peroxidase (HRP)-conjugated anti-M13 antibody. Wells were subsequently washed 8 times followed by incubations with 3,3,′5,5′-tetramethylbenidine/H₂O₂ peroxidase (TMB) substrate for 5-10 min. the reaction was stopped by adding 1M H₃PO₄ and the absorbance was measured spectrophotometrically at 450 nm in a microtiter plate reader. The results are presented in FIG. 12.

### Example 6. New FZD5 Antibodies from 2928 Affinity Maturation Library Selectively Bind FZD5

[0196] Single point ELISAs were performed on 96-well Maxisorp plates coated with the ECDs of human FZD2, FZD5, or FZD8 protein. The plates were incubated with the monoclonal Fab-phage followed by incubation with horseradish peroxidase (HRP)-conjugated anti-M13 antibody. Wells were subsequently washed 8 times followed by incubations with 3,3,′5,5′-tetramethylbenidine/H₂O₂ peroxidase (TMB) substrate for 5-10 min. the reaction was stopped by adding 1M H₃PO₄ and the absorbance was measured spectrophotometrically at 450 nm in a microtiter plate reader. The results are presented in FIG. 13.

### Example 7. Pan-FZD/LRP6 ANT9 and FZD5-Specific/LRP6 ANT9 Activate Wnt Signaling in Cells

[0197] TOPFLASH HEK293 cells were treated overnight with varying concentrations of FZD agonist or a non-targeting control molecule (CM0156) and TCF/LEF-driven luciferase expression was measured using a standard luciferase assay. Both molecules are able to activate FZD-mediated luciferase expression in a concentration-responsive manner. ANT9, which is able to bind to 7 of the 10 FZD receptor subtypes produces a higher maximal activation signal than the FZD5-specific ANT59.

### In Vivo Experiments

### DSS Induced Colitis Model

[0198] In FIG. 24, C57/BL6 mice were given 2% DSS in the drinking water for 7 days and 0.5% DSS for an additional 3 days to induce colitis. Control-FLAg, Pan-FLAg and ANT59 were administered via intraperitoneal injection on days 4 and 7 at a dosage of 10 mg/kg. Mice were weighed daily. On day 10 mice were euthanized and tissues were harvested for measurement of colon length and histology.

### Histology

[0199] For histological analysis, harvested tissues were fixed in 4% paraformaldehyde and embedded in paraffin. Sections of 5 μm were stained with haematoxylin and eosin (H&E). Images were captured using a Nikon Eclipse microscope (FIG. 23).

### Organoid Culture and Viability Measurement

[0200] Small intestine crypts were harvested from 8-week-old, female, C57BL/6 mice and cultured as previously described (O'Rourke et al., 2016). Organoid cultures were passaged and embedded in 25 μl Growth Factor Reduced Matrigel (Corning, 356231) and plated in triplicates in a 48-well plate. Organoid cultures were treated with DMSO, 1 μM LGK974, 1 μM LGK974+50% WNT3A conditioned media, 1 μM LGK974+30 nM Pan-FLAg, 1 μM LGK974+30 nM FZD2-FLAg, 1 μM LGK974+30 nM FZD4-FLAg, 1 μM LGK974+30 nM FZD5-FLAg, 1 μM LGK974+30 nM FZD7-FLAg. Treatments were prepared in 250 μl of complete media, added to each well on day of passaging and changed every 2-3 days. At the endpoint (7 days), 150 μl Cell Titer-Glo3D (Promega) was added to 150 μl media in each well. Organoids were lysed on a rocking platform for 30 min at room temperature. The luminescence reading was measured in duplicates for 20 μl lysate from each well on the Envision multilabel plate reader. The average luminescence reading for each condition was normalized to the control condition to calculate relative viability (FIG. 22).

[0201] EXAMPLE 8. Transient expression of 8 ANT39 variants. A series of eight ANT39 variants (FIGS. 16A and 16B) were transiently expressed in CHO cells using standard manufacture lipid based protocols (ThermoFisher). Briefly cells were grown to a density of approximately 2.0×106 cells/ml in growth media and relevant DNAs were transfected with appropriate transfection reagent. For each variant two alternate input plasmid ratios were tested, either 1:1:2 or 2:1:3 (knob heavy chain: hole heavy chain: light chain). Conditioned media was harvested 7 days later, purified by Protein A Sepharose and the titre measured.

TABLE 11

| | DNA Ratio | Titer |
|---|---|---|
| Molecule | (Knob:Hole:LC) | (mg/L) |
| ANT39 | 1:1:2 | 390 |
| | 2:1:3 | 290 |
| ANT39i | 1:1:2 | 260 |
| | 2:1:3 | 250 |
| ANT39 LALAPS | 1:1:2 | 330 |
| | 2:1:3 | 250 |
| ANT39i LALAPS | 1:1:2 | 300 |
| | 2:1:3 | 270 |
| ANT39 LALAPS | 1:1:2 | 340 |
| Merchant | 2:1:3 | 280 |
| ANT39i LALAPS | 1:1:2 | 240 |
| Merchant | 2:1:3 | 280 |
| ANT39 LALAPS | 1:1:2 | 320 |
| Merchant S:S | 2:1:3 | 190 |
| ANT39i LALAPS | 1:1:2 | 300 |
| Merchant S:S | 2:1:3 | 250 |
| ANT42* | 1:1:2 | 107 |
| ANT42 LALA* | 1:1:2 | 287 |
| ANT42 LALAPS* | 1:1:2 | 95 |
| ANT42i LALAPS* | 1:1:2 | 49 |

*Variants were transiently expressed in HEK293 cells

[0202] Those skilled in the art will recognize, or be able to ascertain, using no more than routine experimentation, numerous equivalents to the specific procedures described herein. Such equivalents are considered to be within the scope of the inventions. Various substitutions, alterations and modifications may be made to the invention without departing from the spirit and scope of the invention. Other aspects, advantages, and modifications are within the scope of the invention.

[0203] The contents of all references, issued patents, and published patent applications cited through this application are hereby incorporated by reference. The appropriate component, process and methods of those patents, applications and other documents may be selected for the invention and embodiments thereof.

[0204] Throughout the specification and the claims which follow, unless the context requires otherwise, the word ‘comprise’, and variations such as ‘comprises’ and ‘comprising’, will be understood to imply the inclusion of a stated integer, step, group of integers or group of steps but not to the exclusion of any other integer, step, group of integers or group of steps.

[0205] To clarify the use of and to hereby provide notice to the public, the phrases “at least one of <A>, <B>, . . . and <N>” or “at least one of <A>, <B>, . . . or <N>” or “at least one of <A>, <B>, . . . <N>, or combinations thereof” or “<A>, <B>, . . . and/or <N>” are defined by the Applicant in the broadest sense, superseding any other implied definitions hereinbefore or hereinafter unless expressly asserted by the Applicant to the contrary, to mean one or more elements selected from the group comprising A, B, . . . and N. In other words, the phrases mean any combination of one or more of the elements A, B, . . . or N including any one element alone or the one element in combination with one or more of the other elements which may also include, in combination, additional elements not listed. Unless otherwise indicated or the context suggests otherwise, as used herein, “a” or “an” means “at least one” or “one or more.”

TABLE 12
Diabody-Fc-Fab amino acid sequences of the “heavy chain” hole construct,
“heavy chain” knob construct and the “light chain” construct of the
FZD4 Agonists, ANT16, ANT18, ANT20, ANT21, ANT39, and ANT42.
The CDRs of the chains are underlined, italicized. The CDRs may be
replaced with the CDRs of another antibody to alter the binding specificity,
e.g., the specificity could be altered to bind another site on the
FZD or LPR5/6, or to another FZD or LPR.
FZD4 Agonist ANT16

| | |
|---|---|
| Knob | EVQLVESGGGLVQPGGSLRLSCAASGFDFTAYAMHWVRQAPGKGL |
| Hc | EWVASIYPSGGYTAYADSVKGRFTISADTSKNTAYLQMNSLRAED |
| construct | TAVYYCARRSYYFALDYWGQGTLVTVSSGGGGSDIQMTQSPSSLS |
| | ASVGDRVTITCRASQSVSSAVAWYQQKPGKAPKLLIYSASSLYSG |
| | VPSRFSGSRSGTDFTLTISSLQPEDFATYYCQQYWAYYSPITFGQ |
| | GTKVEIKGGGGSGGGGSEPKTSDKTHTCPPCPAPELLGGPSVFLF |
| | PPKPKDTLMISRTPEVTCVVVAVSHEDPEVKFNWYVDGVEVHNAK |
| | TKPREEQYGSTYRVVSVLTVLHQDWLNGKEYKCKVSNKALPAPIE |
| | KTISKAKGQPREPMVFDLPPSREEMTKNQVSLWCMVKGFYPSDIA |
| | VEWESNGQPENNYKTTPPVLDSDGSFFLYSKLTVDKSRWQQGNVF |
| | SCSVMHEALHNHYTQKSLSLSPGKGGGSGGGSGGGSGGGSGSTGE |
| | VQLVESGGGLVQPGGSLRLSCAASGFTLSSYSMHWVRQAPGKGLE |
| | WVAYISSYYGYTYYADSVKGRFTISADTSKNTAYLQMNSLRAEDT |
| | AVYYCARPAPGHWGFDYWGQGTLVTVSSASTKGPSVFPLAPSSKS |
| | TSGGTAALGCLVKDYFPEPVTVSWNSGALTSGVHTFPAVLQSSGL |
| | YSLSSVVTVPSSSLGTQTYICNVNHKPSNTKVDKKVEPKSCDKTH |
| | T |
| | (SEQ ID NO: 897) |
| Hole | EVQLVESGGGLVQPGGSLRLSCAASGFDFSSSSIHWVRQAPGKGL |
| Hc | EWVASISSSYGYTYYADSVKGRFTISADTSKNTAYLQMNSLRAED |
| construct | TAVYYCARSWAMDYWGQGTLVTVSSGGGGSDIQMTQSPSSLSASV |
| | GDRVTITCRASQSVSSAVAWYQQKPGKAPKLLIYSASDLYSGVPS |
| | RFSGSRSGTDFTLTISSLQPEDFATYYCQQYAGAGLITFGQGTKV |
| | EIKGGGGSGGGGSEPKSSDKTHTCPPCPAPELLGGPSVFLFPPKP |
| | KDTLMISRTPEVTCVVVAVSHEDPEVKFNWYVDGVEVHNAKTKPR |
| | EEQYGSTYRVVSVLTVLHQDWLNGKEYKCKVSNKALPAPIEKTIS |
| | KAKGQPREPQVYTLPPIRELMTSNQVSLSCAVKGFYPSDIAVEWE |
| | SNGQPENNYKTTPPVLDSDGSFFLVSKLTVDKSRWQQGNVFSCSV |
| | MHEALHNHYTQKSLSLSPGKGGGSGGGSGGGSGGGSGSTGEVQLV |
| | ESGGGLVQPGGSLRLSCAASGFTLSSYSMHWVRQAPGKGLEWVAY |
| | ISSYYGYTYYADSVKGRFTISADTSKNTAYLQMNSLRAEDTAVYY |
| | CARPAPGHWGFDYWGQGTLVTVSSASTKGPSVFPLAPSSKSTSGG |
| | TAALGCLVKDYFPEPVTVSWNSGALTSGVHTFPAVLQSSGLYSLS |
| | SVVTVPSSSLGTQTYICNVNHKPSNTKVDKKVEPKSCDKTHT |
| | (SEQ ID NO: 898) |
| Light | DIQMTQSPSSLSASVGDRVTITCRASQSVSSAVAWYQQKPGKAPK |
| Chain | LLIYSASSLYSGVPSRFSGSRSGTDFTLTISSLQPEDFATYYCQQ |
| | WYYAPITFGQGTKVEIKRTVAAPSVFIFPPSDEQLKSGTASVVCL |
| | LNNFYPREAKVQWKVDNALQSGNSQESVTEQDSKDSTYSLSSTLT |
| | LSKADYEKHKVYACEVTHQGLSSPVTKSFNRGEC |
| | (SEQ ID NO: 899) |

FZD4 Agonist ANT18

| | |
|---|---|
| Knob | MNLLLILTFVAAAVAEVQLVESGGGMVQPGGSLRLSCAASGFNFS |
| Hc | SSSIHWVRQAPGKGLEWVASISSSYGYTYYADSVKGRFTISADTS |
| construct | KNTAYLQMNSLRAEDTAVYYCARGGSGVSHYGSVYYSWWALDYWG |
| | QGTLVTVSSGGGGSDIQMTQSPSSLSASVGDRVTITCRASQSVSS |
| | AVAWYQQKPGKAPKLLIYSASSLYSGVPSRFSGSRSGTDFTLTIS |
| | SLQPEDFATYYCQQASYAPITFGQGTKVEIKGGGGSGGGGSEPKT |
| | SDKTHTCPPCPAPELLGGPSVFLFPPKPKDTLMISRTPEVTCVVV |
| | AVSHEDPEVKFNWYVDGVEVHNAKTKPREEQYGSTYRVVSVLTVL |
| | HQDWLNGKEYKCKVSNKALPAPIEKTISKAKGQPREPMVEDLPPS |
| | REEMTKNQVSLWCMVKGFYPSDIAVEWESNGQPENNYKTTPPVLD |
| | SDGSFFLYSKLTVDKSRWQQGNVFSCSVMHEALHNHYTQKSLSLS |
| | PGKGGGSGGGSGGGSGGGSGSTGEVQLVESGGGLVQPGGSLRLSC |
| | AASGFTLSSYSMHWVRQAPGKGLEWVAYISSYYGYTYYADSVKGR |
| | FTISADTSKNTAYLQMNSLRAEDTAVYYCARPAPGHWGFDYWGQG |
| | TLVTVSSASTKGPSVFPLAPSSKSTSGGTAALGCLVKDYFPEPVT |
| | VSWNSGALTSGVHTFPAVLQSSGLYSLSSVVTVPSSSLGTQTYIC |
| | NVNHKPSNTKVDKKVEPKSCDKTHT |
| | (SEQ ID NO: 900) |
| Hole | MNLLLILTFVAAAVAEVQLVESGGGLVQPGGSLRLSCAASGFNLS |
| Hc | YYYMHWVRQAPGKGLEWVASIYSSYGYTYYADSVKGRFTISADTS |
| construct | KNTAYLQMNSLRAEDTAVYYCARWSHVSGHYSGMDYWGQGTLVTV |
| | SSGGGGSDIQMTQSPSSLSASVGDRVTITCRASQSVSSAVAWYQQ |
| | KPGKAPKLLIYSASSLYSGVPSRFSGSRSGTDFTLTISSLQPEDF |
| | ATYYCQQSSYSLITFGQGTKVEIKGGGGSGGGGSEPKSSDKTHTC |
| | PPCPAPELLGGPSVFLFPPKPKDTLMISRTPEVTCVVVAVSHEDP |
| | EVKFNWYVDGVEVHNAKTKPREEQYGSTYRVVSVLTVLHQDWLNG |
| | KEYKCKVSNKALPAPIEKTISKAKGQPREPQVYTLPPIRELMTSN |
| | QVSLSCAVKGFYPSDIAVEWESNGQPENNYKTTPPVLDSDGSFFL |
| | VSKLTVDKSRWQQGNVFSCSVMHEALHNHYTQKSLSLSPGKGGGS |
| | GGGSGGGSGGGSGSTGEVQLVESGGGLVQPGGSLRLSCAASGFTL |
| | SSYSMHWVRQAPGKGLEWVAYISSYYGYTYYADSVKGRFTISADT |
| | SKNTAYLQMNSLRAEDTAVYYCARPAPGHWGFDYWGQGTLVTVSS |
| | ASTKGPSVFPLAPSSKSTSGGTAALGCLVKDYFPEPVTVSWNSGA |
| | LTSGVHTFPAVLQSSGLYSLSSVVTVPSSSLGTQTYICNVNHKPS |
| | NTKVDKKVEPKSCDKTHT |
| | (SEQ ID NO: 901) |
| Light Chain | MNLLLILTFVAAAVADIQMTQSPSSLSASVGDRVTITCRASQSVS |
| | SAVAWYQQKPGKAPKLLIYSASSLYSGVPSRFSGSRSGT |
| | DFTLTISSLQPEDFATYYCQQWYYAPITFGQGTKVEIKRTVAAPS |
| | VFIFPPSDEQLKSGTASVVCLLNNFYPREAKVQWKVDNALQSGNS |
| | QESVTEQDSKDSTYSLSSTLTLSKADYEKHKVYACEVTHQGLSSP |
| | VTKSFNRGEC |
| | (SEQ ID NO: 902) |

FZD4 Agonist ANT20

| | |
|---|---|
| Knob | MNLLLILTFVAAAVAEVQLVESGGGLVQPGGSLRLSCAASGFDF |
| Hc | AYAMHWVRQAPGKGLEWVASIYPSGGYTAYADSVKGRFTISADTS |
| construct | KNTAYLQMNSLRAEDTAVYYCARRSYYFALDYWGQGTLVTVSSGG |
| | GGSDIQMTQSPSSLSASVGDRVTITCRASQSVSSAVAWYQQKPGK |
| | APKLLIYSASSLYSGVPSRFSGSRSGTDFTLTISSLQPEDFATYY |
| | CQQASYAPITFGQGTKVEIKGGGGSGGGGSEPKTSDKTHTCPPCP |
| | APELLGGPSVFLFPPKPKDTLMISRTPEVTCVVVAVSHEDPEVKF |
| | NWYVDGVEVHNAKTKPREEQYGSTYRVVSVLTVLHQDWLNGKEYK |
| | CKVSNKALPAPIEKTISKAKGQPREPMVFDLPPSREEMTKNQVSL |
| | WCMVKGFYPSDIAVEWESNGQPENNYKTTPPVLDSDGSFFLYSKL |
| | TVDKSRWQQGNVFSCSVMHEALHNHYTQKSLSLSPGKGGGSGGGS |
| | GGGSGGGSGSTGEVQLVESGGGLVQPGGSLRLSCAASGFTLSSYS |
| | MHWVRQAPGKGLEWVAYISSYYGYTYYADSVKGRFTISADTSKNT |
| | AYLQMNSLRAEDTAVYYCARPAPGHWGFDYWGQGTLVTVSSASTK |
| | GPSVFPLAPSSKSTSGGTAALGCLVKDYFPEPVTVSWNSGALTSG |
| | VHTFPAVLQSSGLYSLSSVVTVPSSSLGTQTYICNVNHKPSNTKV |
| | DKKVEPKSCDKTHT |
| | (SEQ ID NO: 903) |
| Hole | MNLLLILTFVAAAVAEVQLVESGGGLVQPGGSLRLSCAASGFNLS |
| Hc | YYYMHWVRQAPGKGLEWVASIYSSYGYTYYADSVKGRFTISADTS |
| construct | KNTAYLQMNSLRAEDTAVYYCARWSHVSGHYSGMDYWGQGTLVTV |
| | SSGGGGSDIQMTQSPSSLSASVGDRVTITCRASQSVSSAVAWYQQ |
| | KPGKAPKLLIYSASDLYSGVPSRFSGSRSGTDFTLTISSLQPEDF |
| | ATYYCQQYAGAGLITFGQGTKVEIKGGGGSGGGGSEPKSSDKTHT |
| | CPPCPAPELLGGPSVFLFPPKPKDTLMISRTPEVTCVVVAVSHED |
| | PEVKFNWYVDGVEVHNAKTKPREEQYGSTYRVVSVLTVLHQDWLN |
| | GKEYKCKVSNKALPAPIEKTISKAKGQPREPQVYTLPPIRELMTS |
| | NQVSLSCAVKGFYPSDIAVEWESNGQPENNYKTTPPVLDSDGSFF |
| | LVSKLTVDKSRWQQGNVFSCSVMHEALHNHYTQKSLSLSPGKGGG |
| | SGGGSGGGSGGGSGSTGEVQLVESGGGLVQPGGSLRLSCAASGFT |
| | LSSYSMHWVRQAPGKGLEWVAYISSYYGYTYYADSVKGRFTISAD |
| | TSKNTAYLQMNSLRAEDTAVYYCARPAPGHWGFDYWGQGTLVTVS |
| | SASTKGPSVFPLAPSSKSTSGGTAALGCLVKDYFPEPVTVSWNSG |
| | ALTSGVHTFPAVLQSSGLYSLSSVVTVPSSSLGTQTYICNVNHKP |
| | SNTKVDKKVEPKSCDKTHT |
| | (SEQ ID NO: 904) |
| Light | MNLLLILTFVAAAVADIQMTQSPSSLSASVGDRVTITCRASQSVS |
| Chain | SAVAWYQQKPGKAPKLLIYSASSLYSGVPSRFSGSRSGTDFTLTI |
| | SSLOPEDFATYYCQQWYYAPITFGQGTKVEIKRTVAAPSVFIFPP |
| | SDEQLKSGTASVVCLLNNFYPREAKVQWKVDNALQSGNSQESVTE |
| | QDSKDSTYSLSSTLTLSKADYEKHKVYACEVTHQGLSSPVTKSFN |
| | RGEC |
| | (SEQ ID NO: 902) |

FZD4 Agonist ANT21

| | |
|---|---|
| Knob | MNLLLILTFVAAAVAEVQLVESGGGLVQPGGSLRLSCAASGENFS |
| Hc | SSSIHWVRQAPGKGLEWVASISSSYGYTYYADSVKGRFTISADTS |
| construct | KNTAYLQMNSLRAEDTAVYYCARGGSGVSHYGSVYYSWWALDYWG |
| | QGTLVTVSSGGGGSDIQMTQSPSSLSASVGDRVTITCRASQSVSS |
| | AVAWYQQKPGKAPKLLIYSASSLYSGVPSRFSGSRSGTDFTLTIS |
| | SLQPEDFATYYCQQYWAYYSPITFGQGTKVEIKGGGGSGGGGSEP |
| | KTSDKTHTCPPCPAPELLGGPSVFLFPPKDTLMISRTPEVTCVVV |
| | AVSHEDPEVKFNWYDGVEVHNAKTKPREEQYGSTRYRVVSVLTVL |
| | HQDQLNGKEYKCKVSNKALPAPEIKTISKAKGQPREPMVEDLPP |
| | SREEMTKNQVSLWCMVKGFYPSDIAVEWESNGQPENNYKTTPPVL |
| | DSDGSFFLYSKLTVDKSRWQQGNVFSCSVMHEALHNHYTQKSLSL |
| | SPGKGGGSGGGSGGGSGGGSGSTGEVQLVESGGGLVQPGGSLRLS |
| | CAASGFTLSSYSMHWVRQAPGKGLEWVAYISSYYGYTYYADSVKG |
| | RFTISADTSKNTAYLQMNSLRAEDTAVYYCARPAPGHWGFDYWGQ |
| | GTLVTVSSASTKGPSVFPLAPSSKSTSGGTAALGCLVKDYFPEPV |
| | TVSWNSGALTSGVHTFPAVLQSSGLYSLSSVVTVPSSSLGTQTYI |
| | CNVNHKPSNTKVDKKVEPKSCDKTHT |
| | (SEQ ID NO: 905) |
| Hole | MNLLLILTFVAAAVAEVQLVESGGGLVQPGGSLRLSCAASGENFS |
| Hc | SSSIHWVRQAPGKGLEWVASISSSYGYTYYADSVKGRFTISADTS |
| construct | KNTAYLQMNSLRAEDTAVYYCARSWAMDYWGQGTLVTVSSGGGGS |
| | DIQMTQSPSSLSASVGDRVTITCRASQSVSSAVAWYQQKPGKAPK |
| | LLIYSASSLYSGVPSRFSGSRSGTDFTLTISSLQPEDFATYYCQQ |
| | SSYSLITFGQGTKVEIKGGGGSGGGGSEPKSSDKTHTCPPCPAPE |
| | LLGGPSVFLFPPKPKDTLMISRTPEVTCVVVAVSHEDPEVKFNWY |
| | VDGVEVHNAKTKPREEQYGSTYRVVSVLTVLHQDWLNGKEYKCKV |
| | SNKALPAPIEKTISKAKGQPREPQVYTLPPIRELMTSNQVSLSCA |
| | VKGFYPSDIAVEWESNGQPENNYKTTPPVLDSDGSFFLVSKLTVD |
| | KSRWQQGNVFSCSVMHEALHNHYTQKSLSLSPGKGGGSGGGSGGG |
| | SGGGSGSTGEVQLVESGGGLVQPGGSLRLSCAASGFTLSSYSMHW |
| | VRQAPGKGLEWVAYISSYYGYTYYADSVKGRFTISADTSKNTAYL |
| | QMNSLRAEDTAVYYCARPAPGHWGFDYWGQGTLVTVSSASTKGPS |
| | VFPLAPSSKSTSGGTAALGCLVKDYFPEPVTVSWNSGALTSGVHT |
| | FPAVLQSSGLYSLSSVVTVPSSSLGTQTYICNVNHKPSNTKVDKK |
| | VEPKSCDKTHT |
| | (SEQ ID NO: 906) |
| Light Chain | MNLLLILTFVAAAVADIQMTQSPSSLSASVGDRVTITCRASQSVS |
| | SAVAWYQQKPGKAPKLLIYSASSLYSGVPSRFSGSRSGTDFTLTI |
| | SSLQPEDFATYYCQQWYYAPITFGQGTKVEIKRTVAAPSVFIFPP |
| | SDEQLKSGTASVVCLLNNFYPREAKVQWKVDNALQSGNSQESVTE |
| | QDSKDSTYSLSSTLTLSKADYEKHKVYACEVTHQGLSSPVTKSFN |
| | RGEC |
| | (SEQ ID NO: 902) |

FZD4 Agonist ANT39

| | |
|---|---|
| Knob Hc | MNLLLILTFVAAAVAEVQLVESGGGLVQPGGSLRLSCAASGEDFT |
| construct | AYAMHWVRQAPGKGLEWVASIYPSGGYTAYADSVKGRFTISADTS |
| | KNTAYLQMNSLRAEDTAVYYCARRSYYFALDYWGQGTLVTVSSGG |
| | GGSDIQMTQSPSSLSASVGDRVTITCRASQSVSSAVAWYQQKPGK |
| | APKLLIYSASSLYSGVPSRFSGSRSGTDFTLTISSLQPEDFATYY |
| | CQQYWAYYSPITFGQGTKVEIKGGGGSGGGGSEPKTSDKTHTCPP |
| | CPAPELLGGPSVFLFPPKPKDTLMISRTPEVTCVVVAVSHEDPEV |
| | KFNWYVDGVEVHNAKTKPREEQYGSTYRVVSVLTVLHQDWLNGKE |
| | YKCKVSNKALPAPIEKTISKAKGQPREPMVFDLPPSREEMTKNQV |
| | SLWCMVKGFYPSDIAVEWESNGQPENNYKTTPPVLDSDGSFFLYS |
| | KLTVDKSRWQQGNVFSCSVMHEALHNHYTQKSLSLSPGKGGGSGG |
| | GSGGGSGGGSGSTGEVQLVESGGGLVQPGGSLRLSCAASGFTLSS |
| | YSMHWVRQAPGKGLEWVAYISSYDSITDYADSVKGRFTISADTSK |
| | NTAYLQMNSLRAEDTAVYYCARPAVGHMAFDYWGQGTLVTVSSAS |
| | TKGPSVFPLAPSSKSTSGGTAALGCLVKDYFPEPVTVSWNSGALT |
| | SGVHTFPAVLQSSGLYSLSSVVTVPSSSLGTQTYICNVNHKPSNT |
| | KVDKKVEPKSCDKTHT |
| | (SEQ ID NO: 907) |
| Hole Hc | MNLLLILTFVAAAVAEVQLVESGGGLVQPGGSLRLSCAASGFDES |
| construct | SSSIHWVRQAPGKGLEWVASISSSYGYTYYADSVKGRFTISADTS |
| | KNTAYLQMNSLRAEDTAVYYCARSWAMDYWGQGTLVTVSSGGGGS |
| | DIQMTQSPSSLSASVGDRVTITCRASQSVSSAVAWYQQKPGKAPK |
| | LLIYSASDLYSGVPSRFSGSRSGTDFTLTISSLQPEDFATYYCQQ |
| | YAGAGLITFGQGTKVEIKGGGGSGGGGSEPKSSDKTHTCPPCPAP |
| | ELLGGPSVFLFPPKPKDTLMISRTPEVTCVVVAVSHEDPEVKFNW |
| | YVDGVEVHNAKTKPREEQYGSTYRVVSVLTVLHQDWLNGKEYKCK |
| | VSNKALPAPIEKTISKAKGQPREPQVYTLPPIRELMTSNQVSLSC |
| | AVKGFYPSDIAVEWESNGQPENNYKTTPPVLDSDGSFFLVSKLTV |
| | DKSRWQQGNVFSCSVMHEALHNHYTQKSLSLSPGKGGGSGGGSGG |
| | GSGGGSGSTGEVQLVESGGGLVQPGGSLRLSCAASGFTLSSYSMH |
| | WVRQAPGKGLEWVAYISSYDSITDYADSVKGRFTISADTSKNTAY |
| | LQMNSLRAEDTAVYYCARPAVGHMAFDYWGQGTLVTVSSASTKGP |
| | SVFPLAPSSKSTSGGTAALGCLVKDYFPEPVTVSWNSGALTSGVH |
| | TFPAVLQSSGLYSLSSVVTVPSSSLGTQTYICNVNHKPSNTKVDK |
| | KVEPKSCDKTHT |
| | (SEQ ID NO: 908) |
| Light Chain | MNLLLILTFVAAAVADIQMTQSPSSLSASVGDRVTITCRASQSVS |
| | SAVAWYQQKPGKAPKLLIYSASSLYSGVPSRFSGSRSGTDFTLTI |
| | SSLQPEDFATYYCQQWYNAPITFGQGTKVEIKRTVAAPSVFIFPP |
| | SDEQLKSGTASVVCLLNNFYPREAKVQWKVDNALQSGNSQESVTE |
| | QDSKDSTYSLSSTLTLSKADYEKHKVYACEVTHQGLSSPVTKSFN |
| | RGEC |
| | (SEQ ID NO: 909) |

FZD4 Agonist ANT42

| | |
|---|---|
| Knob | MNLLLILTFVAAAVAEVQLVESGGGLVQPGGSLRLSCAASGFDFT |
| Hc | AYAMHWVRQAPGKGLEWVASIYPSGGYTAYADSVKGRFTISADTS |
| construct | KNTAYLQMNSLRAEDTAVYYCARRSYYFALDYWGQGTLVTVSSGG |
| | GGSDIQMTQSPSSLSASVGDRVTITCRASQSVSSAVAWYQQKPGK |
| | APKLLIYSASSLYSGVPSRFSGSRSGTDFTLTISSLQPEDFATYY |
| | CQQYWAYYSPITFGQGTKVEIKGGGGSGGGGSEPKTSDKTHTCPP |
| | CPAPELLGGPSVFLFPPKPKDTLMISRTPEVTCVVVAVSHEDPEV |
| | KFNWYVDGVEVHNAKTKPREEQYGSTYRVVSVLTVLHQDWLNGKE |
| | YKCKVSNKALPAPIEKTISKAKGQPREPMVFDLPPSREEMTKNQV |
| | SLWCMVKGFYPSDIAVEWESNGQPENNYKTTPPVLDSDGSFFLYS |
| | KLTVDKSRWQQGNVFSCSVMHEALHNHYTQKSLSLSPGKGGGSGG |
| | GSGGGSGGGSGSTGEVQLVESGGGLVQPGGSLRLSCAASGFTSDF |
| | YFIHWVRQAPGKGLEWVATIYPFIGNTYYADSVKGRFTISADTSK |
| | NTAYLQMNSLRAEDTAVYYCARAFPGSYHPFDYWGQGTLVTVSSA |
| | STKGPSVFPLAPSSKSTSGGTAALGCLVKDYFPEPVTVSWNSGAL |
| | TSGVHTFPAVLQSSGLYSLSSVVTVPSSSLGTQTYICNVNHKPSN |
| | TKVDKKVEPKSCDKTHT |
| | (SEQ ID NO: 910) |
| Hole | MNLLLILTFVAAAVAEVQLVESGGGLVQPGGSLRLSCAASGFDES |
| Hc | SSSIHWVRQAPGKGLEWVASISSSYGYTYYADSVKGRFTISADTS |
| construct | KNTAYLQMNSLRAEDTAVYYCARSWAMDYWGQGTLVTVSSGGGGS |
| | DIQMTQSPSSLSASVGDRVTITCRASQSVSSAVAWYQQKPGKAPK |
| | LLIYSASDLYSGVPSRFSGSRSGTDFTLTISSLQPEDFATYYCQQ |
| | YAGAGLITFGQGTKVEIKGGGGSGGGGSEPKSSDKTHTCPPCPAP |
| | ELLGGPSVFLFPPKPKDTLMISRTPEVTCVVVAVSHEDPEVKFNW |
| | YVDGVEVHNAKTKPREEQYGSTYRVVSVLTVLHQDWLNGKEYKCK |
| | VSNKALPAPIEKTISKAKGQPREPQVYTLPPIRELMTSNQVSLSC |
| | AVKGFYPSDIAVEWESNGQPENNYKTTPPVLDSDGSFFLVSKLTV |
| | DKSRWQQGNVFSCSVMHEALHNHYTQKSLSLSPGKGGGSGGGSGG |
| | GSGGGSGSTGEVQLVESGGGLVQPGGSLRLSCAASGFTSDFYFIH |
| | WVRQAPGKGLEWVATIYPFIGNTYYADSVKGRFTISADTSKNTAY |
| | LQMNSLRAEDTAVYYCARAFPGSYHPFDYWGQGTLVTVSSASTKG |
| | PSVFPLAPSSKSTSGGTAALGCLVKDYFPEPVTVSWNSGALTSGV |
| | HTFPAVLQSSGLYSLSSVVTVPSSSLGTQTYICNVNHKPSNTKVD |
| | KKVEPKSCDKTHT |
| | (SEQ ID NO: 911) |
| Light Chain | MNLLLILTFVAAAVADIQMTQSPSSLSASVGDRVTITCRASQSVS |
| | SAVAWYQQKPGKAPKLLIYSASSLYSGVPSRFSGSRSGTDFTLTI |
| | SSLQPEDFATYYCQQSTGSLITFGQGTKVEIKRTVAAPSVFIFPP |
| | SDEQLKSGTASVVCLLNNFYPREAKVQWKVDNALQSGNSQESVTE |
| | QDSKDSTYSLSSTLTLSKADYEKHKVYACEVTHQGLSSPVTKSFN |
| | RGEC |
| | (SEQ ID NO: 912) |

FZD5-LRP6 ANT 59

| | |
|---|---|
| Knob | EVQLVESGGGLVQPGGSLRLSCAASGFDLSHSSIHWVRQAPGKGL |
| Hc | EWVASISSHYGYTHYADSVKGRFTISADTSKNTAYLQMNSLRAED |
| construct | TAVYYCARSSYFPWFFALDYWGQGTLVTVSSGGGGSDIQMTQSPS |
| | SLSASVGDRVTITCRASQSVSSAVAWYQQKPGKAPKLLIYSASSL |
| | YSGVPSRFSGSRSGTDFTLTISSLQPEDFATYYCQQYYWPITFGQ |
| | GTKVEIKGGGGSGGGGSEPKTSDKTHTCPPCPAPELLGGPSVFLF |
| | PPKPKDTLMISRTPEVTCVVVAVSHEDPEVKFNWYVDGVEVHNAK |
| | TKPREEQYGSTYRVVSVLTVLHQDWLNGKEYKCKVSNKALPAPIE |
| | KTISKAKGQPREPMVFDLPPSREEMTKNQVSLWCMVKGFYPSDIA |
| | VEWESNGQPENNYKTTPPVLDSDGSFFLYSKLTVDKSRWQQGNVF |
| | SCSVMHEALHNHYTQKSLSLSPGKGGGSGGGSGGGSGGGSGSTGE |
| | VQLVESGGGLVQPGGSLRLSCAASGENIAYSSMHWVRQAPGKGLE |
| | WVATIYPSYSSTYYADSVKGRFTISADTSKNTAYLQMNSLRAEDT |
| | AVYYCARYYAMDYWGQGTLVTVSSASTKGPSVFPLAPSSKSTSGG |
| | TAALGCLVKDYFPEPVTVSWNSGALTSGVHTFPAVLQSSGLYSLS |
| | SVVTVPSSSLGTQTYICNVNHKPSNTKVDKKVEPKSCDKTHT |
| | (SEQ ID NO: 913) |
| Hole | EVQLVESGGGLVQPGGSLRLSCAASGFDISSYFIHWVRQAPGKGL |
| Hc | EWVASIYPSYSYTSYADSVKGRFTISADTSKNTAYLQMNSLRAED |
| construct | TAVYYCARNVRGFRKPYFSRWAMDYWGQGTLVTVSSGGGGSDIQM |
| | TQSPSSLSASVGDRVTITCRASQSVSSAVAWYQQKPGKAPKLLIY |
| | SASSLYSGVPSRFSGSRSGTDFTLTISSLQPEDFATYYCQQYFFP |
| | ITFGQGTKVEIKGGGGSGGGGSEPKSSDKTHTCPPCPAPELLGGP |
| | SVFLFPPKPKDTLMISRTPEVTCVVVAVSHEDPEVKFNWYVDGVE |
| | VHNAKTKPREEQYGSTYRVVSVLTVLHQDWLNGKEYKCKVSNKAL |
| | PAPIEKTISKAKGQPREPQVYTLPPIRELMTSNQVSLSCAVKGFY |
| | PSDIAVEWESNGQPENNYKTTPPVLDSDGSFFLVSKLTVDKSRWQ |
| | QGNVFSCSVMHEALHNHYTQKSLSLSPGKGGGSGGGSGGGSGGGS |
| | GSTGEVQLVESGGGLVQPGGSLRLSCAASGENIAYSSMHWVRQAP |
| | GKGLEWVATIYPSYSSTYYADSVKGRFTISADTSKNTAYLQMNSL |
| | RAEDTAVYYCARYYAMDYWGQGTLVTVSSASTKGPSVFPLAPSSK |
| | STSGGTAALGCLVKDYFPEPVTVSWNSGALTSGVHTFPAVLQSSG |
| | LYSLSSVVTVPSSSLGTQTYICNVNHKPSNTKVDKKVEPKSCDKT |
| | HT |
| | (SEQ ID NO: 914) |
| Light | DIQMTQSPSSLSASVGDRVTITCRASQSVSSAVAWYQQKPGKAPK |
| Chain | LLIYSASSLYSGVPSRFSGSRSGTDFTLTISSLQPEDFATYYCQQ |
| | AHYFPITFGQGTKVEIKRTVAAPSVFIFPPSDEQLKSGTASVVCL |
| | LNNFYPREAKVQWKVDNALQSGNSQESVTEQDSKDSTYSLSSTLT |
| | LSKADYEKHKVYACEVTHQGLSSPVTKSFNRGEC |
| | (SEQ ID NO: 915) |

pFZD-LRP6 ANT9

| | |
|---|---|
| Knob | EVQLVESGGGLVQPGGSLRLSCAASGFDLSHSSIHWVRQAPGKGL |
| Hc | EWVASISSHYGYTHYADSVKGRFTISADTSKNTAYLQMNSLRAED |
| construct | TAVYYCARSSYFPWFFALDYWGQGTLVTVSSGGGGSDIQMTQSPS |
| | SLSASVGDRVTITCRASQSVSSAVAWYQQKPGKAPKLLIYSASSL |
| | YSGVPSRFSGSRSGTDFTLTISSLQPEDFATYYCQQYYWPITFGQ |
| | GTKVEIKGGGGSGGGGSEPKTSDKTHTCPPCPAPELLGGPSVFLF |
| | PPKPKDTLMISRTPEVTCVVVAVSHEDPEVKFNWYVDGVEVHNAK |
| | TKPREEQYGSTYRVVSVLTVLHQDWLNGKEYKCKVSNKALPAPIE |
| | KTISKAKGQPREPMVFDLPPSREEMTKNQVSLWCMVKGFYPSDIA |
| | VEWESNGQPENNYKTTPPVLDSDGSFFLYSKLTVDKSRWQQGNVF |
| | SCSVMHEALHNHYTQKSLSLSPGKGGGSGGGSGGGSGGGSGSTGE |
| | VQLVESGGGLVQPGGSLRLSCAASGFNIHSSSIHWVRQAPGKGLE |
| | WVAATYSSFGSITYADSVKGRFTISADTSKNTAYLQMNSLRAEDT |
| | AVYYCARYHHPFGYALDYWGQGTLVTVSSASTKGPSVFPLAPSSK |
| | STSGGTAALGCLVKDYFPEPVTVSWNSGALTSGVHTFPAVLQSSG |
| | LYSLSSVVTVPSSSLGTQTYICNVNHKPSNTKVDKKVEPKSCDKT |
| | HT |
| | (SEQ ID NO: 916) |
| Hole | EVQLVESGGGLVQPGGSLRLSCAASGFDISSYFIHWVRQAPGKGL |
| Hc | EWVASIYPSYSYTSYADSVKGRFTISADTSKNTAYLQMNSLRAED |
| construct | TAVYYCARNVRGFRKPYFSRWAMDYWGQGTLVTVSSGGGGSDIQM |
| | TQSPSSLSASVGDRVTITCRASQSVSSAVAWYQQKPGKAPKLLIY |
| | SASSLYSGVPSRFSGSRSGTDFTLTISSLQPEDFATYYCQQYFFP |
| | ITFGQGTKVEIKGGGGGGGGSEPKSSDKTHTCPPCPAPELLGGPS |
| | VFLFPPKPKDTLMISRTPEVTCVVVAVSHEDPEVKFNWYVDGVEV |
| | HNAKTKPREEQYGSTYRVVSVLTVLHQDWLNGKEYKCKVSNKALP |
| | APIEKTISKAKGQPREPQVYTLPPIRELMTSNQVSLSCAVKGFYP |
| | SDIAVEWESNGQPENNYKTTPPVLDSDGSFFLVSKLTVDKSRWQQ |
| | GNVFSCSVMHEALHNHYTQKSLSLSPGKGGGSGGGSGGGSGGGSG |
| | STGEVQLVESGGGLVQPGGSLRLSCAASGFNIHSSSIHWVRQAPG |
| | KGLEWVAATYSSFGSITYADSVKGRFTISADTSKNTAYLQMNSLR |
| | AEDTAVYYCARYHHPFGYALDYWGQGTLVTVSSASTKGPSVFPLA |
| | PSSKSTSGGTAALGCLVKDYFPEPVTVSWNSGALTSGVHTFPAVL |
| | QSSGLYSLSSVVTVPSSSLGTQTYICNVNHKPSNTKVDKKVEPKS |
| | CDKTHT |
| | (SEQ ID NO: 917) |
| Light | DIQMTQSPSSLSASVGDRVTITCRASQSVSSAVAWYQQKPGKAPK |
| Chain | LLIYSASSLYSGVPSRFSGSRSGTDFTLTISSLQPEDFATYYCQQ |
| | GVYLFTFGQGTKVEIKRTVAAPSVFIFPPSDEQLKSGTASVVCLL |
| | NNFYPREAKVQWKVDNALQSGNSQESVTEQDSKDSTYSLSSTLTL |
| | SKADYEKHKVYACEVTHQGLSSPVTKSFNRGEC |
| | (SEQ ID NO: 918) |

diabody-Fc-diabody FZD4 CM0199

| | |
|---|---|
| Knob | EFEVQLVESGGGLVQPGGSLRLSCAASGENSSFYFMHWVRQAPGK |
| Hc | GLEWVATVYPYLDYTYYADSVKGRFTISADTSKNTAYLQMNSLRA |
| construct | EDTAVYYCARAFPGSYHPMDYWGQGTLVTVSSGGGGSDIQMTQSP |
| | SSLSASVGDRVTITCRASQSVSSAVAWYQQKPGKAPKLLIYSASS |
| | LYSGVPSRFSGSRSGTDFTLTISSLQPEDFATYYCQQSSYSLITF |
| | GQGTKVEIKLEDKTHTKVEPKTSDKTHTCPPCPAPELLGGPSVFL |
| | FPPKPKDTLMISRTPEVTCVVVDVSHEDPEVKFNWYVDGVEVHNA |
| | KTKPREEQYNSTYRVVSVLTVLHQDWLNGKEYKCKVSNKALPAPI |
| | EKTISKAKGQPREPMVFDLPPSREEMTKNQVSLWCMVKGFYPSDI |
| | AVEWESNGQPENNYKTTPPVLDSDGSFFLYSKLTVDKSRWQQGNV |
| | FSCSVMHEALHNHYTQKSLSLSPGKSGSETPGTSESATPESGGGE |
| | VQLVESGGGLVQPGGSLRLSCAASGENFSSSSIHWVRQAPGKGLE |
| | WVASISSSYGYTYYADSVKGRFTISADTSKNTAYLQMNSLRAEDT |
| | AVYYCARGGSGVSHYGSVYYSWWALDYWGQGTLVTVSSGGGGSDI |
| | QMTQSPSSLSASVGDRVTITCRASQSVSSAVAWYQQKPGKAPKLL |
| | IYSASSLYSGVPSRFSGSRSGTDFTLTISSLQPEDFATYYCQQAS |
| | YAPITFGQGTKVEIK |
| | (SEQ ID NO: 919) |
| Hole | EFEVQLVESGGGLVQPGGSLRLSCAASGENSSFYFMHWVRQAPGK |
| Hc | GLEWVATVYPYLDYTYYADSVKGRFTISADTSKNTAYLQMNSLRA |
| construct | EDTAVYYCARAFPGSYHPMDYWGQGTLVTVSSGGGGSDIQMTQSP |
| | SSLSASVGDRVTITCRASQSVSSAVAWYQQKPGKAPKLLIYSASS |
| | LYSGVPSRFSGSRSGTDFTLTISSLQPEDFATYYCQQSSYSLITF |
| | GQGTKVEIKLEDKTHTKVEPKSSDKTHNCPPCPAPELLGGPSVFL |
| | FPPKPKDTLMISRTPEVTCVVVDVSHEDPEVKFNWYVDGVEVHNA |
| | KTKPREEQYNSTYRVVSVLTVLHQDWLNGKEYKCKVSNKALPAPI |
| | EKTISKAKGQPREPQVYTLPPIRELMTSNQVSLSCAVKGFYPSDI |
| | AVEWESNGQPENNYKTTPPVLDSDGSFFLVSKLTVDKSRWQQGNV |
| | FSCSVMHEALHNHYTQKSLSLSPGKSGSETPGTSESATPESGGGE |
| | VQLVESGGGLVQPGGSLRLSCAASGFNLSYYYMHWVRQAPGKGLE |
| | WVASIYSSYGYTYYADSVKGRFTISADTSKNTAYLQMNSLRAEDT |
| | AVYYCARWSHVSGHYSGMDYWGQGTLVTVSSGGGGSDIQMTQSPS |
| | SLSASVGDRVTITCRASQSVSSAVAWYQQKPGKAPKLLIYSASSL |
| | YSGVPSRFSGSRSGTDFTLTISSLQPEDFATYYCQQSSYSLITFG |
| | QGTKVEIK |
| | (SEQ ID NO: 920) |

TABLE 13
Diabody-Fc-Fab and IgG-Diabody amino acid sequences of the “heavy chain”
hole construct, “heavy chain” knob construct and the “light chain” construct
of the FZD4 Agonists, ANT39 and ANT42, ANT39 and ANT42, and ANT39i and ANT42i
having Fc domain amino acid mutations DANG, LALAPS, LALAPS and Merchant or
LALAPS and Merchant S-S. Mature sequences do not include the 5′ leader peptide.
The V-region CDRs of the chains are underlined, italicized and bolded, Fc null
mutations are italicized, CH3 heterodimerisation mutations are underlined and
italicized, CH3 cys disulphide bridges are bolded, and linkers are underlined.

ANT39i HC hole DANG
MNLLLILTFVAAAVAEVQLVESGGGLVQPGGSLRLSCAASGFTLSSYSMHWVRQAPGKGLEWVAYISSYDSITDYADSVKGRFTISAD
TSKNTAYLQMNSLRAEDTAVYYCARPAVGHMAFDYWGQGTLVTVSSASTKGPSVFPLAPSSKSTSGGTAALGCLVKDYFPEPVTVSWN
SGALTSGVHTFPAVLQSSGLYSLSSVVTVPSSSLGTQTYICNVNHKPSNTKVDKKVEPKSCDKTHTCPPCPAPELLGGPSVFLFPPKP
KDTLMISRTPEVTCVVVAVSHEDPEVKFNWYVDGVEVHNAKTKPREEQYGSTYRVVSVLTVLHQDWLNGKEYKCKVSNKALPAPIEKT
ISKAKGQPREPQVYTLPPIRELMTSNQVSLSCAVKGFYPSDIAVEWESNGQPENNYKTTPPVLDSDGSFFLVSKLTVDKSRWQQGNVF
SCSVMHEALHNHYTQKSLSLSPGKGGGSGGGSGGGSGGGSGSTGEVQLVESGGGLVQPGGSLRLSCAASGFDFSSSSIHWVRQAPGKG
LEWVASISSSYGYTYYADSVKGRFTISADTSKNTAYLQMNSLRAEDTAVYYCARSWAMDYWGQGTLVTVSSGGGGSDIQMTQSPSSLS
ASVGDRVTITCRASQSVSSAVAWYQQKPGKAPKLLIYSASDLYSGVPSRFSGSRSGTDFTLTISSLQPEDFATYYCQQYAGAGLITFG
QGTKVEIK* (SEQ ID NO: 921)
ANT39i HC hole LALAPS
MNLLLILTFVAAAVAEVQLVESGGGLVQPGGSLRLSCAASGFTLSSYSMHWVRQAPGKGLEWVAYISSYDSITDYADSVKGRFTISAD
TSKNTAYLQMNSLRAEDTAVYYCARPAVGHMAFDYWGQGTLVTVSSASTKGPSVFPLAPSSKSTSGGTAALGCLVKDYFPEPVTVSWN
SGALTSGVHTFPAVLQSSGLYSLSSVVTVPSSSLGTQTYICNVNHKPSNTKVDKKVEPKSCDKTHTCPPCPAPEAAGGPSVFLFPPKP
KDTLMISRTPEVTCVVVDVSHEDPEVKFNWYVDGVEVHNAKTKPREEQYNSTYRVVSVLTVLHQDWLNGKEYKCKVSNKALPASIEKT
ISKAKGQPREPQVYTLPPIRELMTSNQVSLSCAVKGFYPSDIAVEWESNGQPENNYKTTPPVLDSDGSFFLVSKLTVDKSRWQQGNVF
SCSVMHEALHNHYTQKSLSLSPGKGGGSGGGSGGGSGGGSGSTGEVQLVESGGGLVQPGGSLRLSCAASGFDFSSSSIHWVRQAPGKG
LEWVASISSSYGYTYYADSVKGRFTISADTSKNTAYLQMNSLRAEDTAVYYCARSWAMDYWGQGTLVTVSSGGGGSDIQMTQSPSSLS
ASVGDRVTITCRASQSVSSAVAWYQQKPGKAPKLLIYSASDLYSGVPSRFSGSRSGTDFTLTISSLQPEDFATYYCQQYAGAGLITFG
QGTKVEIK* (SEQ ID NO: 922)
ANT39i HC hole LALAPS Merchant
MNLLLILTFVAAAVAEVQLVESGGGLVQPGGSLRLSCAASGFTLSSYSMHWVRQAPGKGLEWVAYISSYDSITDYADSVKGRFTISAD
TSKNTAYLQMNSLRAEDTAVYYCARPAVGHMAFDYWGQGTLVTVSSASTKGPSVFPLAPSSKSTSGGTAALGCLVKDYFPEPVTVSWN
SGALTSGVHTFPAVLQSSGLYSLSSVVTVPSSSLGTQTYICNVNHKPSNTKVDKKVEPKSCDKTHTCPPCPAPEAAGGPSVFLFPPKP
KDTLMISRTPEVTCVVVDVSHEDPEVKFNWYVDGVEVHNAKTKPREEQYNSTYRVVSVLTVLHQDWLNGKEYKCKVSNKALPASIEKT
ISKAKGQPREPQVYTLPPSREEMTKNQVSLSCAVKGFYPSDIAVEWESNGQPENNYKTTPPVLDSDGSFFLVSKLTVDKSRWQQGNVF
SCSVMHEALHNHYTQKSLSLSPGKGGGSGGGSGGGSGGGSGSTGEVQLVESGGGLVQPGGSLRLSCAASGFDFSSSSIHWVRQAPGKG
LEWVASISSSYGYTYYADSVKGRFTISADTSKNTAYLQMNSLRAEDTAVYYCARSWAMDYWGQGTLVTVSSGGGGSDIQMTQSPSSLS
ASVGDRVTITCRASQSVSSAVAWYQQKPGKAPKLLIYSASDLYSGVPSRFSGSRSGTDFTLTISSLQPEDFATYYCQQYAGAGLITFG
QGTKVEIK* (SEQ ID NO: 923)
ANT39i HC hole LALAPS Merchant S-S
MNLLLILTFVAAAVAEVQLVESGGGLVQPGGSLRLSCAASGFTLSSYSMHWVRQAPGKGLEWVAYISSYDSITDYADSVKGRFTISAD
TSKNTAYLQMNSLRAEDTAVYYCARPAVGHMAFDYWGQGTLVTVSSASTKGPSVFPLAPSSKSTSGGTAALGCLVKDYFPEPVTVSWN
SGALTSGVHTFPAVLQSSGLYSLSSVVTVPSSSLGTQTYICNVNHKPSNTKVDKKVEPKSCDKTHTCPPCPAPEAAGGPSVFLFPPKP
KDTLMISRTPEVTCVVVDVSHEDPEVKFNWYVDGVEVHNAKTKPREEQYNSTYRVVSVLTVLHQDWLNGKEYKCKVSNKALPASIEKT
ISKAKGQPREPQVCTLPPSREEMTKNQVSLSCAVKGFYPSDIAVEWESNGQPENNYKTTPPVLDSDGSFFLVSKLTVDKSRWQQGNVF
SCSVMHEALHNHYTQKSLSLSPGKGGGSGGGSGGGSGGGSGSTGEVQLVESGGGLVQPGGSLRLSCAASGFDFSSSSIHWVRQAPGKG
LEWVASISSSYGYTYYADSVKGRFTISADTSKNTAYLQMNSLRAEDTAVYYCARSWAMDYWGQGTLVTVSSGGGGSDIQMTQSPSSLS
ASVGDRVTITCRASQSVSSAVAWYQQKPGKAPKLLIYSASDLYSGVPSRFSGSRSGTDFTLTISSLQPEDFATYYCQQYAGAGLITFG
QGTKVEIK* (SEQ ID NO: 924)
Mature ANT39i HC hole DANG
EVQLVESGGGLVQPGGSLRLSCAASGFTLSSYSMHWVRQAPGKGLEWVAYISSYDSITDYADSVKGRFTISADTSKNTAYLQMNSLRA
EDTAVYYCARPAVGHMAFDYWGQGTLVTVSSASTKGPSVFPLAPSSKSTSGGTAALGCLVKDYFPEPVTVSWNSGALTSGVHTFPAVL
QSSGLYSLSSVVTVPSSSLGTQTYICNVNHKPSNTKVDKKVEPKSCDKTHTCPPCPAPELLGGPSVFLFPPKPKDTLMISRTPEVTCV
VVAVSHEDPEVKFNWYVDGVEVHNAKTKPREEQYGSTYRVVSVLTVLHQDWLNGKEYKCKVSNKALPAPIEKTISKAKGQPREPQVYT
LPPIRELMTSNQVSLSCAVKGFYPSDIAVEWESNGQPENNYKTTPPVLDSDGSFFLVSKLTVDKSRWQQGNVFSCSVMHEALHNHYTQ
KSLSLSPGKGGGSGGGSGGGSGGGSGSTGEVQLVESGGGLVQPGGSLRLSCAASGFDFSSSSIHWVRQAPGKGLEWVASISSSYGYTY
YADSVKGRFTISADTSKNTAYLQMNSLRAEDTAVYYCARSWAMDYWGQGTLVTVSSGGGGSDIQMTQSPSSLSASVGDRVTITCRASQ
SVSSAVAWYQQKPGKAPKLLIYSASDLYSGVPSRFSGSRSGTDFTLTISSLQPEDFATYYCQQYAGAGLITFGQGTKVEIK* (SEQ
ID NO: 925)
Mature ANT39i HC hole LALAPS
EVQLVESGGGLVQPGGSLRLSCAASGFTLSSYSMHWVRQAPGKGLEWVAYISSYDSITDYADSVKGRFTISADTSKNTAYLQMNSLRA
EDTAVYYCARPAVGHMAFDYWGQGTLVTVSSASTKGPSVFPLAPSSKSTSGGTAALGCLVKDYFPEPVTVSWNSGALTSGVHTFPAVL
QSSGLYSLSSVVTVPSSSLGTQTYICNVNHKPSNTKVDKKVEPKSCDKTHTCPPCPAPEAAGGPSVFLFPPKPKDTLMISRTPEVTCV
VVDVSHEDPEVKFNWYVDGVEVHNAKTKPREEQYNSTYRVVSVLTVLHQDWLNGKEYKCKVSNKALPASIEKTISKAKGQPREPQVYT
LPPIRELMTSNQVSLSCAVKGFYPSDIAVEWESNGQPENNYKTTPPVLDSDGSFFLVSKLTVDKSRWQQGNVFSCSVMHEALHNHYTQ
KSLSLSPGKGGGSGGGSGGGSGGGSGSTGEVQLVESGGGLVQPGGSLRLSCAASGFDFSSSSIHWVRQAPGKGLEWVASISSSYGYTY
YADSVKGRFTISADTSKNTAYLQMNSLRAEDTAVYYCARSWAMDYWGQGTLVTVSSGGGGSDIQMTQSPSSLSASVGDRVTITCRASQ
SVSSAVAWYQQKPGKAPKLLIYSASDLYSGVPSRFSGSRSGTDFTLTISSLQPEDFATYYCQQYAGAGLITFGQGTKVEIK* (SEQ
ID NO: 926)
Mature ANT39i HC hole LALAPS Merchant
EVQLVESGGGLVQPGGSLRLSCAASGFTLSSYSMHWVRQAPGKGLEWVAYISSYDSITDYADSVKGRFTISADTSKNTAYLQMNSLRA
EDTAVYYCARPAVGHMAFDYWGQGTLVTVSSASTKGPSVFPLAPSSKSTSGGTAALGCLVKDYFPEPVTVSWNSGALTSGVHTFPAVL
QSSGLYSLSSVVTVPSSSLGTQTYICNVNHKPSNTKVDKKVEPKSCDKTHTCPPCPAPEAAGGPSVFLFPPKPKDTLMISRTPEVTCV
VVDVSHEDPEVKFNWYVDGVEVHNAKTKPREEQYNSTYRVVSVLTVLHQDWLNGKEYKCKVSNKALPASIEKTISKAKGQPREPQVYT
LPPSREEMTKNQVSLSCAVKGFYPSDIAVEWESNGQPENNYKTTPPVLDSDGSFFLVSKLTVDKSRWQQGNVFSCSVMHEALHNHYTQ
KSLSLSPGKGGGSGGGSGGGSGGGSGSTGEVQLVESGGGLVQPGGSLRLSCAASGFDFSSSSIHWVRQAPGKGLEWVASISSSYGYTY
YADSVKGRFTISADTSKNTAYLQMNSLRAEDTAVYYCARSWAMDYWGQGTLVTVSSGGGGSDIQMTQSPSSLSASVGDRVTITCRASQ
SVSSAVAWYQQKPGKAPKLLIYSASDLYSGVPSRFSGSRSGTDFTLTISSLQPEDFATYYCQQYAGAGLITFGQGTKVEIK* (SEQ
ID NO: 927)
Mature ANT39i HC hole LALAPS Merchant S-S
EVQLVESGGGLVQPGGSLRLSCAASGFTLSSYSMHWVRQAPGKGLEWVAYISSYDSITDYADSVKGRFTISADTSKNTAYLQMNSLRA
EDTAVYYCARPAVGHMAFDYWGQGTLVTVSSASTKGPSVFPLAPSSKSTSGGTAALGCLVKDYFPEPVTVSWNSGALTSGVHTFPAVL
QSSGLYSLSSVVTVPSSSLGTQTYICNVNHKPSNTKVDKKVEPKSCDKTHTCPPCPAPEAAGGPSVFLFPPKPKDTLMISRTPEVTCV
VVDVSHEDPEVKFNWYVDGVEVHNAKTKPREEQYNSTYRVVSVLTVLHQDWLNGKEYKCKVSNKALPASIEKTISKAKGQPREPQVCT
LPPSREEMTKNQVSLSCAVKGFYPSDIAVEWESNGQPENNYKTTPPVLDSDGSFFLVSKLTVDKSRWQQGNVFSCSVMHEALHNHYTQ
KSLSLSPGKGGGSGGGSGGGSGGGSGSTGEVQLVESGGGLVQPGGSLRLSCAASGFDFSSSSIHWVRQAPGKGLEWVASISSSYGYTY
YADSVKGRFTISADTSKNTAYLQMNSLRAEDTAVYYCARSWAMDYWGQGTLVTVSSGGGGSDIQMTQSPSSLSASVGDRVTITCRASQ
SVSSAVAWYQQKPGKAPKLLIYSASDLYSGVPSRFSGSRSGTDFTLTISSLQPEDFATYYCQQYAGAGLITFGQGTKVEIK* (SEQ
ID NO: 928)
ANT39i HC knob DANG
MNLLLILTFVAAAVAEVQLVESGGGLVQPGGSLRLSCAASGFTLSSYSMHWVRQAPGKGLEWVAYISSYDSITDYADSVKGRFTISAD
TSKNTAYLQMNSLRAEDTAVYYCARPAVGHMAFDYWGQGTLVTVSSASTKGPSVFPLAPSSKSTSGGTAALGCLVKDYFPEPVTVSWN
SGALTSGVHTFPAVLQSSGLYSLSSVVTVPSSSLGTQTYICNVNHKPSNTKVDKKVEPKSCDKTHTCPPCPAPELLGGPSVFLFPPKP
KDTLMISRTPEVTCVVVAVSHEDPEVKFNWYVDGVEVHNAKTKPREEQYGSTYRVVSVLTVLHQDWLNGKEYKCKVSNKALPAPIEKT
ISKAKGQPREPMVFDLPPSREEMTKNQVSLWCMVKGFYPSDIAVEWESNGQPENNYKTTPPVLDSDGSFFLYSKLTVDKSRWQQGNVF
SCSVMHEALHNHYTQKSLSLSPGKGGGSGGGSGGGSGGGSGSTGEVQLVESGGGLVQPGGSLRLSCAASGFDFTAYAMHWVRQAPGKG
LEWVASIYPSGGYTAYADSVKGRFTISADTSKNTAYLQMNSLRAEDTAVYYCARRSYYFALDYWGQGTLVTVSSGGGGSDIQMTQSPS
SLSASVGDRVTITCRASQSVSSAVAWYQQKPGKAPKLLIYSASSLYSGVPSRFSGSRSGTDFTLTISSLQPEDFATYYCQQYWAYYSP
ITFGQGTKVEIK* (SEQ ID NO: 929)
ANT39i HC Knob LALAPS
MNLLLILTFVAAAVAEVQLVESGGGLVQPGGSLRLSCAASGFTLSSYSMHWVRQAPGKGLEWVAYISSYDSITDYADSVKGRFTISAD
TSKNTAYLQMNSLRAEDTAVYYCARPAVGHMAFDYWGQGTLVTVSSASTKGPSVFPLAPSSKSTSGGTAALGCLVKDYFPEPVTVSWN
SGALTSGVHTFPAVLQSSGLYSLSSVVTVPSSSLGTQTYICNVNHKPSNTKVDKKVEPKSCDKTHTCPPCPAPEAAGGPSVFLFPPKP
KDTLMISRTPEVTCVVVDVSHEDPEVKFNWYVDGVEVHNAKTKPREEQYNSTYRVVSVLTVLHQDWLNGKEYKCKVSNKALPASIEKT
ISKAKGQPREPMVFDLPPSREEMTKNQVSLWCMVKGFYPSDIAVEWESNGQPENNYKTTPPVLDSDGSFFLYSKLTVDKSRWQQGNVF
SCSVMHEALHNHYTQKSLSLSPGKGGGSGGGSGGGSGGGSGSTGEVQLVESGGGLVQPGGSLRLSCAASGEDFTAYAMHWVRQAPGKG
LEWVASIYPSGGYTAYADSVKGRFTISADTSKNTAYLQMNSLRAEDTAVYYCARRSYYFALDYWGQGTLVTVSSGGGGSDIQMTQSPS
SLSASVGDRVTITCRASQSVSSAVAWYQQKPGKAPKLLIYSASSLYSGVPSRFSGSRSGTDFTLTISSLQPEDFATYYCQQYWAYYSP
ITFGQGTKVEIK* (SEQ ID NO: 930)
ANT39i HC Knob LALAPS Merchant
MNLLLILTFVAAAVAEVQLVESGGGLVQPGGSLRLSCAASGFTLSSYSMHWVRQAPGKGLEWVAYISSYDSITDYADSVKGRFTISAD
TSKNTAYLQMNSLRAEDTAVYYCARPAVGHMAFDYWGQGTLVTVSSASTKGPSVFPLAPSSKSTSGGTAALGCLVKDYFPEPVTVSWN
SGALTSGVHTFPAVLQSSGLYSLSSVVTVPSSSLGTQTYICNVNHKPSNTKVDKKVEPKSCDKTHTCPPCPAPEAAGGPSVFLFPPKP
KDTLMISRTPEVTCVVVDVSHEDPEVKFNWYVDGVEVHNAKTKPREEQYNSTYRVVSVLTVLHQDWLNGKEYKCKVSNKALPASIEKT
ISKAKGQPREPQVYTLPPSREEMTKNQVSLWCLVKGFYPSDIAVEWESNGQPENNYKTTPPVLDSDGSFFLYSKLTVDKSRWQQGNVF
SCSVMHEALHNHYTQKSLSLSPGKGGGSGGGSGGGSGGGSGSTGEVQLVESGGGLVQPGGSLRLSCAASGFDFTAYAMHWVRQAPGKG
LEWVASIYPSGGYTAYADSVKGRFTISADTSKNTAYLQMNSLRAEDTAVYYCARRSYYFALDYWGQGTLVTVSSGGGGSDIQMTQSPS
SLSASVGDRVTITCRASQSVSSAVAWYQQKPGKAPKLLIYSASSLYSGVPSRFSGSRSGTDFTLTISSLQPEDFATYYCQQYWAYYSP
ITFGQGTKVEIK* (SEQ ID NO: 931)
ANT39i HC Knob LALAPS Merchant S-S
MNLLLILTFVAAAVAEVQLVESGGGLVQPGGSLRLSCAASGFTLSSYSMHWVRQAPGKGLEWVAYISSYDSITDYADSVKGRFTISAD
TSKNTAYLQMNSLRAEDTAVYYCARPAVGHMAFDYWGQGTLVTVSSASTKGPSVFPLAPSSKSTSGGTAALGCLVKDYFPEPVTVSWN
SGALTSGVHTFPAVLQSSGLYSLSSVVTVPSSSLGTQTYICNVNHKPSNTKVDKKVEPKSCDKTHTCPPCPAPEAAGGPSVFLFPPKP
KDTLMISRTPEVTCVVVDVSHEDPEVKFNWYVDGVEVHNAKTKPREEQYNSTYRVVSVLTVLHQDWLNGKEYKCKVSNKALPASIEKT
ISKAKGQPREPQVYTLPPCREEMTKNQVSLWCLVKGFYPSDIAVEWESNGQPENNYKTTPPVLDSDGSFFLYSKLTVDKSRWQQGNVF
SCSVMHEALHNHYTQKSLSLSPGKGGGSGGGSGGGSGGGSGSTGEVQLVESGGGLVQPGGSLRLSCAASGFDFTAYAMHWVRQAPGKG
LEWVASIYPSGGYTAYADSVKGRFTISADTSKNTAYLQMNSLRAEDTAVYYCARRSYYFALDYWGQGTLVTVSSGGGGSDIQMTQSPS
SLSASVGDRVTITCRASQSVSSAVAWYQQKPGKAPKLLIYSASSLYSGVPSRFSGSRSGTDFTLTISSLQPEDFATYYCQQYWAYYSP
ITFGQGTKVEIK* (SEQ ID NO: 932)
Mature ANT39i HC knob DANG
EVQLVESGGGLVQPGGSLRLSCAASGFTLSSYSMHWVRQAPGKGLEWVAYISSYDSITDYADSVKGRFTISADTSKNTAYLQMNSLRA
EDTAVYYCARPAVGHMAFDYWGQGTLVTVSSASTKGPSVFPLAPSSKSTSGGTAALGCLVKDYFPEPVTVSWNSGALTSGVHTFPAVL
QSSGLYSLSSVVTVPSSSLGTQTYICNVNHKPSNTKVDKKVEPKSCDKTHTCPPCPAPELLGGPSVFLFPPKPKDTLMISRTPEVTCV
VVAVSHEDPEVKFNWYVDGVEVHNAKTKPREEQYGSTYRVVSVLTVLHQDWLNGKEYKCKVSNKALPAPIEKTISKAKGQPREPMVFD
LPPSREEMTKNQVSLWCMVKGFYPSDIAVEWESNGQPENNYKTTPPVLDSDGSFFLYSKLTVDKSRWQQGNVFSCSVMHEALHNHYTQ
KSLSLSPGKGGGSGGGSGGGSGGGSGSTGEVQLVESGGGLVQPGGSLRLSCAASGFDFTAYAMHWVRQAPGKGLEWVASIYPSGGYTA
YADSVKGRFTISADTSKNTAYLQMNSLRAEDTAVYYCARRSYYFALDYWGQGTLVTVSSGGGGSDIQMTQSPSSLSASVGDRVTITCR
ASQSVSSAVAWYQQKPGKAPKLLIYSASSLYSGVPSRFSGSRSGTDFTLTISSLQPEDFATYYCQQYWAYYSPITFGQGTKVEIK*
(SEQ ID NO: 933)
Mature ANT39i HC Knob LALAPS
EVQLVESGGGLVQPGGSLRLSCAASGFTLSSYSMHWVRQAPGKGLEWVAYISSYDSITDYADSVKGRFTISADTSKNTAYLQMNSLRA
EDTAVYYCARPAVGHMAFDYWGQGTLVTVSSASTKGPSVFPLAPSSKSTSGGTAALGCLVKDYFPEPVTVSWNSGALTSGVHTFPAVL
QSSGLYSLSSVVTVPSSSLGTQTYICNVNHKPSNTKVDKKVEPKSCDKTHTCPPCPAPEAAGGPSVFLFPPKPKDTLMISRTPEVTCV
VVDVSHEDPEVKFNWYVDGVEVHNAKTKPREEQYNSTYRVVSVLTVLHQDWLNGKEYKCKVSNKALPASIEKTISKAKGQPREPMVFD
LPPSREEMTKNQVSLWCMVKGFYPSDIAVEWESNGQPENNYKTTPPVLDSDGSFFLYSKLTVDKSRWQQGNVFSCSVMHEALHNHYTQ
KSLSLSPGKGGGSGGGSGGGSGGGSGSTGEVQLVESGGGLVQPGGSLRLSCAASGFDFTAYAMHWVRQAPGKGLEWVASIYPSGGYTA
YADSVKGRFTISADTSKNTAYLQMNSLRAEDTAVYYCARRSYYFALDYWGQGTLVTVSSGGGGSDIQMTQSPSSLSASVGDRVTITCR
ASQSVSSAVAWYQQKPGKAPKLLIYSASSLYSGVPSRFSGSRSGTDFTLTISSLQPEDFATYYCQQYWAYYSPITFGQGTKVEIK*
(SEQ ID NO: 934)
Mature ANT39i HC Knob LALAPS Merchant
EVQLVESGGGLVQPGGSLRLSCAASGFTLSSYSMHWVRQAPGKGLEWVAYISSYDSITDYADSVKGRFTISADTSKNTAYLQMNSLRA
EDTAVYYCARPAVGHMAFDYWGQGTLVTVSSASTKGPSVFPLAPSSKSTSGGTAALGCLVKDYFPEPVTVSWNSGALTSGVHTFPAVL
QSSGLYSLSSVVTVPSSSLGTQTYICNVNHKPSNTKVDKKVEPKSCDKTHTCPPCPAPEAAGGPSVFLFPPKPKDTLMISRTPEVTCV
VVDVSHEDPEVKFNWYVDGVEVHNAKTKPREEQYNSTYRVVSVLTVLHQDWLNGKEYKCKVSNKALPASIEKTISKAKGQPREPQVYT
LPPSREEMTKNQVSLWCLVKGFYPSDIAVEWESNGQPENNYKTTPPVLDSDGSFFLYSKLTVDKSRWQQGNVFSCSVMHEALHNHYTQ
KSLSLSPGKGGGSGGGSGGGSGGGSGSTGEVQLVESGGGLVQPGGSLRLSCAASGFDFTAYAMHWVRQAPGKGLEWVASIYPSGGYTA
YADSVKGRFTISADTSKNTAYLQMNSLRAEDTAVYYCARRSYYFALDYWGQGTLVTVSSGGGGSDIQMTQSPSSLSASVGDRVTITCR
ASQSVSSAVAWYQQKPGKAPKLLIYSASSLYSGVPSRFSGSRSGTDFTLTISSLQPEDFATYYCQQYWAYYSPITFGQGTKVEIK*
(SEQ ID NO: 935)
Mature ANT39i HC Knob LALAPS Merchant S-S
EVQLVESGGGLVQPGGSLRLSCAASGFTLSSYSMHWVRQAPGKGLEWVAYISSYDSITDYADSVKGRFTISADTSKNTAYLQMNSLRA
EDTAVYYCARPAVGHMAFDYWGQGTLVTVSSASTKGPSVFPLAPSSKSTSGGTAALGCLVKDYFPEPVTVSWNSGALTSGVHTFPAVL
QSSGLYSLSSVVTVPSSSLGTQTYICNVNHKPSNTKVDKKVEPKSCDKTHTCPPCPAPEAAGGPSVFLFPPKPKDTLMISRTPEVTCV
VVDVSHEDPEVKFNWYVDGVEVHNAKTKPREEQYNSTYRVVSVLTVLHQDWLNGKEYKCKVSNKALPASIEKTISKAKGQPREPQVYT
LPPCREEMTKNQVSLWCLVKGFYPSDIAVEWESNGQPENNYKTTPPVLDSDGSFFLYSKLTVDKSRWQQGNVFSCSVMHEALHNHYTQ
KSLSLSPGKGGGSGGGSGGGSGGGSGSTGEVQLVESGGGLVQPGGSLRLSCAASGFDFTAYAMHWVRQAPGKGLEWVASIYPSGGYTA
YADSVKGRFTISADTSKNTAYLQMNSLRAEDTAVYYCARRSYYFALDYWGQGTLVTVSSGGGGSDIQMTQSPSSLSASVGDRVTITCR
ASQSVSSAVAWYQQKPGKAPKLLIYSASSLYSGVPSRFSGSRSGTDFTLTISSLQPEDFATYYCQQYWAYYSPITFGQGTKVEIK*
(SEQ ID NO: 936)
ANT39 Hc Hole DANG
MNLLLILTFVAAAVAEVQLVESGGGLVQPGGSLRLSCAASGFDFSSSSIHWVRQAPGKGLEWVASISSSYGYTYYADSVKGRFTISAD
TSKNTAYLQMNSLRAEDTAVYYCARSWAMDYWGQGTLVTVSSGGGGSDIQMTQSPSSLSASVGDRVTITCRASQSVSSAVAWYQQKPG
KAPKLLIYSASDLYSGVPSRFSGSRSGTDFTLTISSLQPEDFATYYCQQYAGAGLITFGQGTKVEIKGGGGSGGGGSEPKSSDKTHTC
PPCPAPELLGGPSVFLFPPKPKDTLMISRTPEVTCVVVAVSHEDPEVKFNWYVDGVEVHNAKTKPREEQYGSTYRVVSVLTVLHQDWL
NGKEYKCKVSNKALPAPIEKTISKAKGQPREPQVYTLPPIRELMTSNQVSLSCAVKGFYPSDIAVEWESNGQPENNYKTTPPVLDSDG
SFFLVSKLTVDKSRWQQGNVFSCSVMHEALHNHYTQKSLSLSPGKGGGSGGGSGGGSGGGSGSTGEVQLVESGGGLVQPGGSLRLSCA
ASGFTLSSYSMHWVRQAPGKGLEWVAYISSYDSITDYADSVKGRFTISADTSKNTAYLQMNSLRAEDTAVYYCARPAVGHMAFDYWGQ
GTLVTVSSASTKGPSVFPLAPSSKSTSGGTAALGCLVKDYFPEPVTVSWNSGALTSGVHTFPAVLQSSGLYSLSSVVTVPSSSLGTQT
YICNVNHKPSNTKVDKKVEPKSCDKTHT* (SEQ ID NO: 908)
ANT39 Hc Hole LALAPS
MNLLLILTFVAAAVAEVQLVESGGGLVQPGGSLRLSCAASGFDFSSSSIHWVRQAPGKGLEWVASISSSYGYTYYADSVKGRFTISAD
TSKNTAYLQMNSLRAEDTAVYYCARSWAMDYWGQGTLVTVSSGGGGSDIQMTQSPSSLSASVGDRVTITCRASQSVSSAVAWYQQKPG
KAPKLLIYSASDLYSGVPSRFSGSRSGTDFTLTISSLQPEDFATYYCQQYAGAGLITFGQGTKVEIKGGGGSGGGGSEPKSSDKTHTC
PPCPAPEAAGGPSVFLFPPKPKDTLMISRTPEVTCVVVDVSHEDPEVKFNWYVDGVEVHNAKTKPREEQYNSTYRVVSVLTVLHQDWL
NGKEYKCKVSNKALPASIEKTISKAKGQPREPQVYTLPPIRELMTSNQVSLSCAVKGFYPSDIAVEWESNGQPENNYKTTPPVLDSDG
SFFLVSKLTVDKSRWQQGNVFSCSVMHEALHNHYTQKSLSLSPGKGGGSGGGSGGGSGGGSGSTGEVQLVESGGGLVQPGGSLRLSCA
ASGFTLSSYSMHWVRQAPGKGLEWVAYISSYDSITDYADSVKGRFTISADTSKNTAYLQMNSLRAEDTAVYYCARPAVGHMAFDYWGQ
GTLVTVSSASTKGPSVFPLAPSSKSTSGGTAALGCLVKDYFPEPVTVSWNSGALTSGVHTFPAVLQSSGLYSLSSVVTVPSSSLGTQT
YICNVNHKPSNTKVDKKVEPKSCDKTHT* (SEQ ID NO: 937)
ANT39 Hc Hole LALAPS Merchant
MNLLLILTFVAAAVAEVQLVESGGGLVQPGGSLRLSCAASGFDFSSSSIHWVRQAPGKGLEWVASISSSYGYTYYADSVKGRFTISAD
TSKNTAYLQMNSLRAEDTAVYYCARSWAMDYWGQGTLVTVSSGGGGSDIQMTQSPSSLSASVGDRVTITCRASQSVSSAVAWYQQKPG
KAPKLLIYSASDLYSGVPSRFSGSRSGTDFTLTISSLQPEDFATYYCQQYAGAGLITFGQGTKVEIKGGGGSGGGGSEPKSSDKTHTC
PPCPAPEAAGGPSVFLFPPKPKDTLMISRTPEVTCVVVDVSHEDPEVKFNWYVDGVEVHNAKTKPREEQYNSTYRVVSVLTVLHQDWL
NGKEYKCKVSNKALPASIEKTISKAKGQPREPQVYTLPPSREEMTKNQVSLSCAVKGFYPSDIAVEWESNGQPENNYKTTPPVLDSDG
SFFLVSKLTVDKSRWQQGNVFSCSVMHEALHNHYTQKSLSLSPGKGGGSGGGSGGGSGGGSGSTGEVQLVESGGGLVQPGGSLRLSCA
ASGFTLSSYSMHWVRQAPGKGLEWVAYISSYDSITDYADSVKGRFTISADTSKNTAYLQMNSLRAEDTAVYYCARPAVGHMAFDYWGQ
GTLVTVSSASTKGPSVFPLAPSSKSTSGGTAALGCLVKDYFPEPVTVSWNSGALTSGVHTFPAVLQSSGLYSLSSVVTVPSSSLGTQT
YICNVNHKPSNTKVDKKVEPKSCDKTHT* (SEQ ID NO: 938)
ANT39 Hc Hole LALAPS Merchant S-S
MNLLLILTFVAAAVAEVQLVESGGGLVQPGGSLRLSCAASGFDFSSSSIHWVRQAPGKGLEWVASISSSYGYTYYADSVKGRFTISAD
TSKNTAYLQMNSLRAEDTAVYYCARSWAMDYWGQGTLVTVSSGGGGSDIQMTQSPSSLSASVGDRVTITCRASQSVSSAVAWYQQKPG
KAPKLLIYSASDLYSGVPSRFSGSRSGTDFTLTISSLQPEDFATYYCQQYAGAGLITFGQGTKVEIKGGGGSGGGGSEPKSSDKTHTC
PPCPAPEAAGGPSVFLFPPKPKDTLMISRTPEVTCVVVDVSHEDPEVKFNWYVDGVEVHNAKTKPREEQYNSTYRVVSVLTVLHQDWL
NGKEYKCKVSNKALPASIEKTISKAKGQPREPQVCTLPPSREEMTKNQVSLSCAVKGFYPSDIAVEWESNGQPENNYKTTPPVLDSDG
SFFLVSKLTVDKSRWQQGNVFSCSVMHEALHNHYTQKSLSLSPGKGGGSGGGSGGGSGGGSGSTGEVQLVESGGGLVQPGGSLRLSCA
ASGFTLSSYSMHWVRQAPGKGLEWVAYISSYDSITDYADSVKGRFTISADTSKNTAYLQMNSLRAEDTAVYYCARPAVGHMAFDYWGQ
GTLVTVSSASTKGPSVFPLAPSSKSTSGGTAALGCLVKDYFPEPVTVSWNSGALTSGVHTFPAVLQSSGLYSLSSVVTVPSSSLGTQT
YICNVNHKPSNTKVDKKVEPKSCDKTHT* (SEQ ID NO: 939)
Mature ANT39 Hc Hole DANG
EVQLVESGGGLVQPGGSLRLSCAASGFDFSSSSIHWVRQAPGKGLEWVASISSSYGYTYYADSVKGRFTISADTSKNTAYLQMNSLRA
EDTAVYYCARSWAMDYWGQGTLVTVSSGGGGSDIQMTQSPSSLSASVGDRVTITCRASQSVSSAVAWYQQKPGKAPKLLIYSASDLYS
GVPSRFSGSRSGTDFTLTISSLQPEDFATYYCQQYAGAGLITFGQGTKVEIKGGGGSGGGGSEPKSSDKTHTCPPCPAPELLGGPSVF
LFPPKPKDTLMISRTPEVTCVVVAVSHEDPEVKFNWYVDGVEVHNAKTKPREEQYGSTYRVVSVLTVLHQDWLNGKEYKCKVSNKALP
APIEKTISKAKGQPREPQVYTLPPIRELMTSNQVSLSCAVKGFYPSDIAVEWESNGQPENNYKTTPPVLDSDGSFFLVSKLTVDKSRW
QQGNVFSCSVMHEALHNHYTQKSLSLSPGKGGGSGGGSGGGSGGGSGSTGEVQLVESGGGLVQPGGSLRLSCAASGFTLSSYSMHWVR
QAPGKGLEWVAYISSYDSITDYADSVKGRFTISADTSKNTAYLQMNSLRAEDTAVYYCARPAVGHMAFDYWGQGTLVTVSSASTKGPS
VFPLAPSSKSTSGGTAALGCLVKDYFPEPVTVSWNSGALTSGVHTFPAVLQSSGLYSLSSVVTVPSSSLGTQTYICNVNHKPSNTKVD
KKVEPKSCDKTHT* (SEQ ID NO: 940)
Mature ANT39 Hc Hole LALAPS
EVQLVESGGGLVQPGGSLRLSCAASGFDFSSSSIHWVRQAPGKGLEWVASISSSYGYTYYADSVKGRFTISADTSKNTAYLQMNSLRA
EDTAVYYCARSWAMDYWGQGTLVTVSSGGGGSDIQMTQSPSSLSASVGDRVTITCRASQSVSSAVAWYQQKPGKAPKLLIYSASDLYS
GVPSRFSGSRSGTDFTLTISSLQPEDFATYYCQQYAGAGLITFGQGTKVEIKGGGGSGGGGSEPKSSDKTHTCPPCPAPEAAGGPSVF
LFPPKPKDTLMISRTPEVTCVVVDVSHEDPEVKFNWYVDGVEVHNAKTKPREEQYNSTYRVVSVLTVLHQDWLNGKEYKCKVSNKALP
ASIEKTISKAKGQPREPQVYTLPPIRELMTSNQVSLSCAVKGFYPSDIAVEWESNGQPENNYKTTPPVLDSDGSFFLVSKLTVDKSRW
QQGNVFSCSVMHEALHNHYTQKSLSLSPGKGGGSGGGSGGGSGGGSGSTGEVQLVESGGGLVQPGGSLRLSCAASGFTLSSYSMHWVR
QAPGKGLEWVAYISSYDSITDYADSVKGRFTISADTSKNTAYLQMNSLRAEDTAVYYCARPAVGHMAFDYWGQGTLVTVSSASTKGPS
VFPLAPSSKSTSGGTAALGCLVKDYFPEPVTVSWNSGALTSGVHTFPAVLQSSGLYSLSSVVTVPSSSLGTQTYICNVNHKPSNTKVD
KKVEPKSCDKTHT* (SEQ ID NO: 941)
Mature ANT39 Hc Hole LALAPS Merchant
EVQLVESGGGLVQPGGSLRLSCAASGFDFSSSSIHWVRQAPGKGLEWVASISSSYGYTYYADSVKGRFTISADTSKNTAYLQMNSLRA
EDTAVYYCARSWAMDYWGQGTLVTVSSGGGGSDIQMTQSPSSLSASVGDRVTITCRASQSVSSAVAWYQQKPGKAPKLLIYSASDLYS
GVPSRFSGSRSGTDFTLTISSLQPEDFATYYCQQYAGAGLITFGQGTKVEIKGGGGSGGGGSEPKSSDKTHTCPPCPAPEAAGGPSVF
LFPPKPKDTLMISRTPEVTCVVVDVSHEDPEVKFNWYVDGVEVHNAKTKPREEQYNSTYRVVSVLTVLHQDWLNGKEYKCKVSNKALP
ASIEKTISKAKGQPREPQVYTLPPSREEMTKNQVSLSCAVKGFYPSDIAVEWESNGQPENNYKTTPPVLDSDGSFFLVSKLTVDKSRW
QQGNVFSCSVMHEALHNHYTQKSLSLSPGKGGGSGGGSGGGSGGGSGSTGEVQLVESGGGLVQPGGSLRLSCAASGFTLSSYSMHWVR
QAPGKGLEWVAYISSYDSITDYADSVKGRFTISADTSKNTAYLQMNSLRAEDTAVYYCARPAVGHMAFDYWGQGTLVTVSSASTKGPS
VFPLAPSSKSTSGGTAALGCLVKDYFPEPVTVSWNSGALTSGVHTFPAVLQSSGLYSLSSVVTVPSSSLGTQTYICNVNHKPSNTKVD
KKVEPKSCDKTHT* (SEQ ID NO: 942)
Mature ANT39 Hc Hole LALAPS Merchant S-S
EVQLVESGGGLVQPGGSLRLSCAASGFDFSSSSIHWVRQAPGKGLEWVASISSSYGYTYYADSVKGRFTISADTSKNTAYLQMNSLRA
EDTAVYYCARSWAMDYWGQGTLVTVSSGGGGSDIQMTQSPSSLSASVGDRVTITCRASQSVSSAVAWYQQKPGKAPKLLIYSASDLYS
GVPSRFSGSRSGTDFTLTISSLQPEDFATYYCQQYAGAGLITFGQGTKVEIKGGGGGGGGSEPKSSDKTHTCPPCPAPEAAGGPSVFL
FPPKPKDTLMISRTPEVTCVVVDVSHEDPEVKFNWYVDGVEVHNAKTKPREEQYNSTYRVVSVLTVLHQDWLNGKEYKCKVSNKALPA
SIEKTISKAKGQPREPQVCTLPPSREEMTKNQVSLSCAVKGFYPSDIAVEWESNGQPENNYKTTPPVLDSDGSFFLESKLTVDKSRWQ
QGNVFSCSVMHEALHNHYTQKSLSLSPGKGGGSGGGSGGGSGGGSGSTGEVQLVESGGGLVQPGGSLRLSCAASGFTLSSYSMHWVRQ
APGKGLEWVAYISSYDSITDYADSVKGRFTISADTSKNTAYLQMNSLRAEDTAVYYCARPAVGHMAFDYWGQGTLVTVSSASTKGPSV
FPLAPSSKSTSGGTAALGCLVKDYFPEPVTVSWNSGALTSGVHTFPAVLQSSGLYSLSSVVTVPSSSLGTQTYICNVNHKPSNTKVDK
KVEPKSCDKTHT* (SEQ ID NO: 943)
ANT39 Hc knob DANG
MNLLLILTFVAAAVAEVQLVESGGGLVQPGGSLRLSCAASGEDFTAYAMHWVRQAPGKGLEWVASIYPSGGYTAYADSVKGRFTISAD
TSKNTAYLQMNSLRAEDTAVYYCARRSYYFALDYWGQGTLVTVSSGGGGSDIQMTQSPSSLSASVGDRVTITCRASQSVSSAVAWYQQ
KPGKAPKLLIYSASSLYSGVPSRFSGSRSGTDFTLTISSLQPEDFATYYCQQYWAYYSPITFGQGTKVEIKGGGGSGGGGSEPKSSDK
THTCPPCPAPELLGGPSVFLFPPKPKDTLMISRTPEVTCVVVAVSHEDPEVKFNWYVDGVEVHNAKTKPREEQYGSTYRVVSVLTVLH
QDWLNGKEYKCKVSNKALPAPIEKTISKAKGQPREPMVFDLPPSREEMTKNQVSLWCMVKGFYPSDIAVEWESNGQPENNYKTTPPVL
DSDGSFFLYSKLTVDKSRWQQGNVFSCSVMHEALHNHYTQKSLSLSPGKGGGSGGGSGGGSGGGSGSTGEVQLVESGGGLVQPGGSLR
LSCAASGFTLSSYSMHWVRQAPGKGLEWVAYISSYDSITDYADSVKGRFTISADTSKNTAYLQMNSLRAEDTAVYYCARPAVGHMAFD
YWGQGTLVTVSSASTKGPSVFPLAPSSKSTSGGTAALGCLVKDYFPEPVTVSWNSGALTSGVHTFPAVLQSSGLYSLSSVVTVPSSSL
GTQTYICNVNHKPSNTKVDKKVEPKSCDKTHT* (SEQ ID NO: 944)
ANT39 Hc knob LALAPS
MNLLLILTFVAAAVAEVQLVESGGGLVQPGGSLRLSCAASGFDFTAYAMHWVRQAPGKGLEWVASIYPSGGYTAYADSVKGRFTISAD
TSKNTAYLQMNSLRAEDTAVYYCARRSYYFALDYWGQGTLVTVSSGGGGSDIQMTQSPSSLSASVGDRVTITCRASQSVSSAVAWYQQ
KPGKAPKLLIYSASSLYSGVPSRFSGSRSGTDFTLTISSLQPEDFATYYCQQYWAYYSPITFGQGTKVEIKGGGGSGGGGSEPKSSDK
THTCPPCPAPEAAGGPSVFLFPPKPKDTLMISRTPEVTCVVVDVSHEDPEVKFNWYVDGVEVHNAKTKPREEQYNSTYRVVSVLTVLH
QDWLNGKEYKCKVSNKALPASIEKTISKAKGQPREPMVFDLPPSREEMTKNQVSLWCMVKGFYPSDIAVEWESNGQPENNYKTTPPVL
DSDGSFFLYSKLTVDKSRWQQGNVFSCSVMHEALHNHYTQKSLSLSPGKGGGSGGGSGGGSGGGSGSTGEVQLVESGGGLVQPGGSLR
LSCAASGFTLSSYSMHWVRQAPGKGLEWVAYISSYDSITDYADSVKGRFTISADTSKNTAYLQMNSLRAEDTAVYYCARPAVGHMAFD
YWGQGTLVTVSSASTKGPSVFPLAPSSKSTSGGTAALGCLVKDYFPEPVTVSWNSGALTSGVHTFPAVLQSSGLYSLSSVVTVPSSSL
GTQTYICNVNHKPSNTKVDKKVEPKSCDKTHT* (SEQ ID NO: 945)
ANT39 Hc knob LALAPS Merchant
MNLLLILTFVAAAVAEVQLVESGGGLVQPGGSLRLSCAASGEDFTAYAMHWVRQAPGKGLEWVASIYPSGGYTAYADSVKGRFTISAD
TSKNTAYLQMNSLRAEDTAVYYCARRSYYFALDYWGQGTLVTVSSGGGGSDIQMTQSPSSLSASVGDRVTITCRASQSVSSAVAWYQQ
KPGKAPKLLIYSASSLYSGVPSRFSGSRSGTDFTLTISSLQPEDFATYYCQQYWAYYSPITFGQGTKVEIKGGGGSGGGGSEPKSSDK
THTCPPCPAPEAAGGPSVFLFPPKPKDTLMISRTPEVTCVVVDVSHEDPEVKFNWYVDGVEVHNAKTKPREEQYNSTYRVVSVLTVLH
QDWLNGKEYKCKVSNKALPASIEKTISKAKGQPREPQVYTLPPSREEMTKNQVSLWCLVKGFYPSDIAVEWESNGQPENNYKTTPPVL
DSDGSFFLYSKLTVDKSRWQQGNVFSCSVMHEALHNHYTQKSLSLSPGKGGGSGGGSGGGSGGGSGSTGEVQLVESGGGLVQPGGSLR
LSCAASGFTLSSYSMHWVRQAPGKGLEWVAYISSYDSITDYADSVKGRFTISADTSKNTAYLQMNSLRAEDTAVYYCARPAVGHMAFD
YWGQGTLVTVSSASTKGPSVFPLAPSSKSTSGGTAALGCLVKDYFPEPVTVSWNSGALTSGVHTFPAVLQSSGLYSLSSVVTVPSSSL
GTQTYICNVNHKPSNTKVDKKVEPKSCDKTHT* (SEQ ID NO: 946)
ANT39 Hc knob LALAPS Merchant S-S
MNLLLILTFVAAAVAEVQLVESGGGLVQPGGSLRLSCAASGFDFTAYAMHWVRQAPGKGLEWVASIYPSGGYTAYADSVKGRFTISAD
TSKNTAYLQMNSLRAEDTAVYYCARRSYYFALDYWGQGTLVTVSSGGGGSDIQMTQSPSSLSASVGDRVTITCRASQSVSSAVAWYQQ
KPGKAPKLLIYSASSLYSGVPSRFSGSRSGTDFTLTISSLQPEDFATYYCQQYWAYYSPITFGQGTKVEIKGGGGSGGGGSEPKSSDK
THTCPPCPAPEAAGGPSVFLFPPKPKDTLMISRTPEVTCVVVDVSHEDPEVKFNWYVDGVEVHNAKTKPREEQYNSTYRVVSVLTVLH
QDWLNGKEYKCKVSNKALPASIEKTISKAKGQPREPQVYTLPPCREEMTKNQVSLWCLVKGFYPSDIAVEWESNGQPENNYKTTPPVL
DSDGSFFLYSKLTVDKSRWQQGNVFSCSVMHEALHNHYTQKSLSLSPGKGGGSGGGSGGGSGGGSGSTGEVQLVESGGGLVQPGGSLR
LSCAASGFTLSSYSMHWVRQAPGKGLEWVAYISSYDSITDYADSVKGRFTISADTSKNTAYLQMNSLRAEDTAVYYCARPAVGHMAFD
YWGQGTLVTVSSASTKGPSVFPLAPSSKSTSGGTAALGCLVKDYFPEPVTVSWNSGALTSGVHTFPAVLQSSGLYSLSSVVTVPSSSL
GTQTYICNVNHKPSNTKVDKKVEPKSCDKTHT* (SEQ ID NO: 947)
Mature ANT39 Hc knob DANG
EVQLVESGGGLVQPGGSLRLSCAASGFDFTAYAMHWVRQAPGKGLEWVASIYPSGGYTAYADSVKGRFTISADTSKNTAYLQMNSLRA
EDTAVYYCARRSYYFALDYWGQGTLVTVSSGGGGSDIQMTQSPSSLSASVGDRVTITCRASQSVSSAVAWYQQKPGKAPKLLIYSASS
LYSGVPSRFSGSRSGTDFTLTISSLQPEDFATYYCQQYWAYYSPITFGQGTKVEIKGGGGSGGGGSEPKSSDKTHTCPPCPAPELLGG
PSVFLFPPKPKDTLMISRTPEVTCVVVAVSHEDPEVKFNWYVDGVEVHNAKTKPREEQYGSTYRVVSVLTVLHQDWLNGKEYKCKVSN
KALPAPIEKTISKAKGQPREPMVFDLPPSREEMTKNQVSLWCMVKGFYPSDIAVEWESNGQPENNYKTTPPVLDSDGSFFLYSKLTVD
KSRWQQGNVFSCSVMHEALHNHYTQKSLSLSPGKGGGSGGGSGGGSGGGSGSTGEVQLVESGGGLVQPGGSLRLSCAASGFTLSSYSM
HWVRQAPGKGLEWVAYISSYDSITDYADSVKGRFTISADTSKNTAYLQMNSLRAEDTAVYYCARPAVGHMAFDYWGQGTLVTVSSAST
KGPSVFPLAPSSKSTSGGTAALGCLVKDYFPEPVTVSWNSGALTSGVHTFPAVLQSSGLYSLSSVVTVPSSSLGTQTYICNVNHKPSN
TKVDKKVEPKSCDKTHT* (SEQ ID NO: 948)
Mature ANT39 Hc knob LALAPS
EVQLVESGGGLVQPGGSLRLSCAASGEDFTAYAMHWVRQAPGKGLEWVASIYPSGGYTAYADSVKGRFTISADTSKNTAYLQMNSLRA
EDTAVYYCARRSYYFALDYWGQGTLVTVSSGGGGSDIQMTQSPSSLSASVGDRVTITCRASQSVSSAVAWYQQKPGKAPKLLIYSASS
LYSGVPSRFSGSRSGTDFTLTISSLQPEDFATYYCQQYWAYYSPITFGQGTKVEIKGGGGSGGGGSEPKSSDKTHTCPPCPAPEAAGG
PSVFLFPPKPKDTLMISRTPEVTCVVVDVSHEDPEVKFNWYVDGVEVHNAKTKPREEQYNSTYRVVSVLTVLHQDWLNGKEYKCKVSN
KALPASIEKTISKAKGQPREPMVFDLPPSREEMTKNQVSLWCMVKGFYPSDIAVEWESNGQPENNYKTTPPVLDSDGSFFLYSKLTVD
KSRWQQGNVFSCSVMHEALHNHYTQKSLSLSPGKGGGSGGGSGGGSGGGSGSTGEVQLVESGGGLVQPGGSLRLSCAASGFTLSSYSM
HWVRQAPGKGLEWVAYISSYDSITDYADSVKGRFTISADTSKNTAYLQMNSLRAEDTAVYYCARPAVGHMAFDYWGQGTLVTVSSAST
KGPSVFPLAPSSKSTSGGTAALGCLVKDYFPEPVTVSWNSGALTSGVHTFPAVLQSSGLYSLSSVVTVPSSSLGTQTYICNVNHKPSN
TKVDKKVEPKSCDKTHT* (SEQ ID NO: 949)
Mature ANT39 Hc knob LALAPS Merchant
EVQLVESGGGLVQPGGSLRLSCAASGFDFTAYAMHWVRQAPGKGLEWVASIYPSGGYTAYADSVKGRFTISADTSKNTAYLQMNSLRA
EDTAVYYCARRSYYFALDYWGQGTLVTVSSGGGGSDIQMTQSPSSLSASVGDRVTITCRASQSVSSAVAWYQQKPGKAPKLLIYSASS
LYSGVPSRFSGSRSGTDFTLTISSLQPEDFATYYCQQYWAYYSPITFGQGTKVEIKGGGGSGGGGSEPKSSDKTHTCPPCPAPEAAGG
PSVFLFPPKPKDTLMISRTPEVTCVVVDVSHEDPEVKFNWYVDGVEVHNAKTKPREEQYNSTYRVVSVLTVLHQDWLNGKEYKCKVSN
KALPASIEKTISKAKGQPREPQVYTLPPSREEMTKNQVSLWCLVKGFYPSDIAVEWESNGQPENNYKTTPPVLDSDGSFFLYSKLTVD
KSRWQQGNVFSCSVMHEALHNHYTQKSLSLSPGKGGGSGGGSGGGSGGGSGSTGEVQLVESGGGLVQPGGSLRLSCAASGFTLSSYSM
HWVRQAPGKGLEWVAYISSYDSITDYADSVKGRFTISADTSKNTAYLQMNSLRAEDTAVYYCARPAVGHMAFDYWGQGTLVTVSSAST
KGPSVFPLAPSSKSTSGGTAALGCLVKDYFPEPVTVSWNSGALTSGVHTFPAVLQSSGLYSLSSVVTVPSSSLGTQTYICNVNHKPSN
TKVDKKVEPKSCDKTHT* (SEQ ID NO: 950)
Mature ANT39 Hc knob LALAPS Merchant
EVQLVESGGGLVQPGGSLRLSCAASGFDFTAYAMHWVRQAPGKGLEWVASIYPSGGYTAYADSVKGRFTISADTSKNTAYLQMNSLRA
EDTAVYYCARRSYYFALDYWGQGTLVTVSSGGGGSDIQMTQSPSSLSASVGDRVTITCRASQSVSSAVAWYQQKPGKAPKLLIYSASS
LYSGVPSRFSGSRSGTDFTLTISSLQPEDFATYYCQQYWAYYSPITFGQGTKVEIKGGGGSGGGGSEPKSSDKTHTCPPCPAPEAAGG
PSVFLFPPKPKDTLMISRTPEVTCVVVDVSHEDPEVKFNWYVDGVEVHNAKTKPREEQYNSTYRVVSVLTVLHQDWLNGKEYKCKVSN
KALPASIEKTISKAKGQPREPQVYTLPPCREEMTKNQVSLWCLVKGFYPSDIAVEWESNGQPENNYKTTPPVLDSDGSFFLYSKLTVD
KSRWQQGNVFSCSVMHEALHNHYTQKSLSLSPGKGGGSGGGSGGGSGGGSGSTGEVQLVESGGGLVQPGGSLRLSCAASGFTLSSYSM
HWVRQAPGKGLEWVAYISSYDSITDYADSVKGRFTISADTSKNTAYLQMNSLRAEDTAVYYCARPAVGHMAFDYWGQGTLVTVSSAST
KGPSVFPLAPSSKSTSGGTAALGCLVKDYFPEPVTVSWNSGALTSGVHTFPAVLQSSGLYSLSSVVTVPSSSLGTQTYICNVNHKPSN
TKVDKKVEPKSCDKTHT* (SEQ ID NO: 951)
ANT39 LC
MNLLLILTFVAAAVADIQMTQSPSSLSASVGDRVTITCRASQSVSSAVAWYQQKPGKAPKLLIYSASSLYSGVPSRFSGSRSGTDFTL
TISSLQPEDFATYYCQQWYNAPITFGQGTKVEIKRTVAAPSVFIFPPSDEQLKSGTASVVCLLNNFYPREAKVQWKVDNALQSGNSQE
SVTEQDSKDSTYSLSSTLTLSKADYEKHKVYACEVTHQGLSSPVTKSFNRGEC* (SEQ ID NO: 909)
Mature ANT39 LC
DIQMTQSPSSLSASVGDRVTITCRASQSVSSAVAWYQQKPGKAPKLLIYSASSLYSGVPSRFSGSRSGTDFTLTISSLQPEDFATYYC
QQWYNAPITFGQGTKVEIKRTVAAPSVFIFPPSDEQLKSGTASVVCLLNNFYPREAKVQWKVDNALQSGNSQESVTEQDSKDSTYSLS
STLTLSKADYEKHKVYACEVTHQGLSSPVTKSFNRGEC (SEQ ID NO: 952)
ANT42i HC hole DANG
MNLLLILTFVAAAVAEVQLVESGGGLVQPGGSLRLSCAASGFTSDFYFIHWVRQAPGKGLEWVATIYPFIGNTYYADSVKGRFTISAD
TSKNTAYLQMNSLRAEDTAVYYCARAFPGSYHPFDYWGQGTLVTVSSASTKGPSVFPLAPSSKSTSGGTAALGCLVKDYFPEPVTVSW
NSGALTSGVHTFPAVLQSSGLYSLSSVVTVPSSSLGTQTYICNVNHKPSNTKVDKKVEPKSCDKTHTCPPCPAPELLGGPSVFLFPPK
PKDTLMISRTPEVTCVVVAVSHEDPEVKFNWYVDGVEVHNAKTKPREEQYGSTYRVVSVLTVLHQDWLNGKEYKCKVSNKALPAPIEK
TISKAKGQPREPQVYTLPPIRELMTSNQVSLSCAVKGFYPSDIAVEWESNGQPENNYKTTPPVLDSDGSFFLVSKLTVDKSRWQQGNV
FSCSVMHEALHNHYTQKSLSLSPGKGGGSGGGSGGGSGGGSGSTGEVQLVESGGGLVQPGGSLRLSCAASGFDFSSSSIHWVRQAPGK
GLEWVASISSSYGYTYYADSVKGRFTISADTSKNTAYLQMNSLRAEDTAVYYCARSWAMDYWGQGTLVTVSSGGGGSDIQMTQSPSSL
SASVGDRVTITCRASQSVSSAVAWYQQKPGKAPKLLIYSASDLYSGVPSRFSGSRSGTDFTLTISSLQPEDFATYYCQQYAGAGLITF
GQGTKVEIK* (SEQ ID NO: 953)
ANT42i HC hole LALAPS
MNLLLILTFVAAAVAEVQLVESGGGLVQPGGSLRLSCAASGFTSDFYFIHWVRQAPGKGLEWVATIYPFIGNTYYADSVKGRFTISAD
TSKNTAYLQMNSLRAEDTAVYYCARAFPGSYHPFDYWGQGTLVTVSSASTKGPSVFPLAPSSKSTSGGTAALGCLVKDYFPEPVTVSW
NSGALTSGVHTFPAVLQSSGLYSLSSVVTVPSSSLGTQTYICNVNHKPSNTKVDKKVEPKSCDKTHTCPPCPAPEAAGGPSVFLFPPK
PKDTLMISRTPEVTCVVVDVSHEDPEVKFNWYVDGVEVHNAKTKPREEQYNSTYRVVSVLTVLHQDWLNGKEYKCKVSNKALPASIEK
TISKAKGQPREPQVYTLPPIRELMTSNQVSLSCAVKGFYPSDIAVEWESNGQPENNYKTTPPVLDSDGSFFLVSKLTVDKSRWQQGNV
FSCSVMHEALHNHYTQKSLSLSPGKGGGSGGGSGGGSGGGSGSTGEVQLVESGGGLVQPGGSLRLSCAASGFDFSSSSIHWVRQAPGK
GLEWVASISSSYGYTYYADSVKGRFTISADTSKNTAYLQMNSLRAEDTAVYYCARSWAMDYWGQGTLVTVSSGGGGSDIQMTQSPSSL
SASVGDRVTITCRASQSVSSAVAWYQQKPGKAPKLLIYSASDLYSGVPSRFSGSRSGTDFTLTISSLQPEDFATYYCQQYAGAGLITF
GQGTKVEIK* (SEQ ID NO: 954)
ANT42i HC hole LALAPS Merchant
MNLLLILTFVAAAVAEVQLVESGGGLVQPGGSLRLSCAASGFTSDFYFIHWVRQAPGKGLEWVATIYPFIGNTYYADSVKGRFTISAD
TSKNTAYLQMNSLRAEDTAVYYCARAFPGSYHPFDYWGQGTLVTVSSASTKGPSVFPLAPSSKSTSGGTAALGCLVKDYFPEPVTVSW
NSGALTSGVHTFPAVLQSSGLYSLSSVVTVPSSSLGTQTYICNVNHKPSNTKVDKKVEPKSCDKTHTCPPCPAPEAAGGPSVFLFPPK
PKDTLMISRTPEVTCVVVDVSHEDPEVKFNWYVDGVEVHNAKTKPREEQYNSTYRVVSVLTVLHQDWLNGKEYKCKVSNKALPASIEK
TISKAKGQPREPQVYTLPPSREEMTKNQVSLSCAVKGFYPSDIAVEWESNGQPENNYKTTPPVLDSDGSFFLVSKLTVDKSRWQQGNV
FSCSVMHEALHNHYTQKSLSLSPGKGGGSGGGSGGGSGGGSGSTGEVQLVESGGGLVQPGGSLRLSCAASGFDFSSSSIHWVRQAPGK
GLEWVASISSSYGYTYYADSVKGRFTISADTSKNTAYLQMNSLRAEDTAVYYCARSWAMDYWGQGTLVTVSSGGGGSDIQMTQSPSSL
SASVGDRVTITCRASQSVSSAVAWYQQKPGKAPKLLIYSASDLYSGVPSRFSGSRSGTDFTLTISSLQPEDFATYYCQQYAGAGLITF
GQGTKVEIK* (SEQ ID NO: 955)
ANT42i HC hole LALAPS Merchant S-S
MNLLLILTFVAAAVAEVQLVESGGGLVQPGGSLRLSCAASGFTSDFYFIHWVRQAPGKGLEWVATIYPFIGNTYYADSVKGRFTISAD
TSKNTAYLQMNSLRAEDTAVYYCARAFPGSYHPFDYWGQGTLVTVSSASTKGPSVFPLAPSSKSTSGGTAALGCLVKDYFPEPVTVSW
NSGALTSGVHTFPAVLQSSGLYSLSSVVTVPSSSLGTQTYICNVNHKPSNTKVDKKVEPKSCDKTHTCPPCPAPEAAGGPSVFLFPPK
PKDTLMISRTPEVTCVVVDVSHEDPEVKFNWYVDGVEVHNAKTKPREEQYNSTYRVVSVLTVLHQDWLNGKEYKCKVSNKALPASIEK
TISKAKGQPREPQVCTLPPSREEMTKNQVSLSCAVKGFYPSDIAVEWESNGQPENNYKTTPPVLDSDGSFFLVSKLTVDKSRWQQGNV
FSCSVMHEALHNHYTQKSLSLSPGKGGGSGGGSGGGSGGGSGSTGEVQLVESGGGLVQPGGSLRLSCAASGFDFSSSSIHWVRQAPGK
GLEWVASISSSYGYTYYADSVKGRFTISADTSKNTAYLQMNSLRAEDTAVYYCARSWAMDYWGQGTLVTVSSGGGGSDIQMTQSPSSL
SASVGDRVTITCRASQSVSSAVAWYQQKPGKAPKLLIYSASDLYSGVPSRFSGSRSGTDFTLTISSLQPEDFATYYCQQYAGAGLITF
GQGTKVEIK* (SEQ ID NO: 956)
Mature ANT42i HC hole DANG
EVQLVESGGGLVQPGGSLRLSCAASGFTSDFYFIHWVRQAPGKGLEWVATIYPFIGNTYYADSVKGRFTISADTSKNTAYLQMNSLRA
EDTAVYYCARAFPGSYHPFDYWGQGTLVTVSSASTKGPSVFPLAPSSKSTSGGTAALGCLVKDYFPEPVTVSWNSGALTSGVHTFPAV
LQSSGLYSLSSVVTVPSSSLGTQTYICNVNHKPSNTKVDKKVEPKSCDKTHTCPPCPAPELLGGPSVFLFPPKPKDTLMISRTPEVTC
VVVAVSHEDPEVKFNWYVDGVEVHNAKTKPREEQYGSTYRVVSVLTVLHQDWLNGKEYKCKVSNKALPAPIEKTISKAKGQPREPQVY
TLPPIRELMTSNQVSLSCAVKGFYPSDIAVEWESNGQPENNYKTTPPVLDSDGSFFLVSKLTVDKSRWQQGNVFSCSVMHEALHNHYT
QKSLSLSPGKGGGSGGGSGGGSGGGSGSTGEVQLVESGGGLVQPGGSLRLSCAASGFDFSSSSIHWVRQAPGKGLEWVASISSSYGYT
YYADSVKGRFTISADTSKNTAYLQMNSLRAEDTAVYYCARSWAMDYWGQGTLVTVSSGGGGSDIQMTQSPSSLSASVGDRVTITCRAS
QSVSSAVAWYQQKPGKAPKLLIYSASDLYSGVPSRFSGSRSGTDFTLTISSLQPEDFATYYCQQYAGAGLITFGQGTKVEIK* (SEQ
ID NO: 957)
Mature ANT42i HC hole LALAPS
EVQLVESGGGLVQPGGSLRLSCAASGFTSDFYFIHWVRQAPGKGLEWVATIYPFIGNTYYADSVKGRFTISADTSKNTAYLQMNSLRA
EDTAVYYCARAFPGSYHPFDYWGQGTLVTVSSASTKGPSVFPLAPSSKSTSGGTAALGCLVKDYFPEPVTVSWNSGALTSGVHTFPAV
LQSSGLYSLSSVVTVPSSSLGTQTYICNVNHKPSNTKVDKKVEPKSCDKTHTCPPCPAPEAAGGPSVFLFPPKPKDTLMISRTPEVTC
VVVDVSHEDPEVKFNWYVDGVEVHNAKTKPREEQYNSTYRVVSVLTVLHQDWLNGKEYKCKVSNKALPASIEKTISKAKGQPREPQVY
TLPPIRELMTSNQVSLSCAVKGFYPSDIAVEWESNGQPENNYKTTPPVLDSDGSFFLVSKLTVDKSRWQQGNVFSCSVMHEALHNHYT
QKSLSLSPGKGGGSGGGSGGGSGGGSGSTGEVQLVESGGGLVQPGGSLRLSCAASGFDFSSSSIHWVRQAPGKGLEWVASISSSYGYT
YYADSVKGRFTISADTSKNTAYLQMNSLRAEDTAVYYCARSWAMDYWGQGTLVTVSSGGGGSDIQMTQSPSSLSASVGDRVTITCRAS
QSVSSAVAWYQQKPGKAPKLLIYSASDLYSGVPSRFSGSRSGTDFTLTISSLQPEDFATYYCQQYAGAGLITFGQGTKVEIK* (SEQ
ID NO: 958)
Mature ANT42i HC hole LALAPS Merchant
EVQLVESGGGLVQPGGSLRLSCAASGFTSDFYFIHWVRQAPGKGLEWVATIYPFIGNTYYADSVKGRFTISADTSKNTAYLQMNSLRA
EDTAVYYCARAFPGSYHPFDYWGQGTLVTVSSASTKGPSVFPLAPSSKSTSGGTAALGCLVKDYFPEPVTVSWNSGALTSGVHTFPAV
LQSSGLYSLSSVVTVPSSSLGTQTYICNVNHKPSNTKVDKKVEPKSCDKTHTCPPCPAPEAAGGPSVFLFPPKPKDTLMISRTPEVTC
VVVDVSHEDPEVKFNWYVDGVEVHNAKTKPREEQYNSTYRVVSVLTVLHQDWLNGKEYKCKVSNKALPASIEKTISKAKGQPREPQVY
TLPPSREEMTKNQVSLSCAVKGFYPSDIAVEWESNGQPENNYKTTPPVLDSDGSFFLVSKLTVDKSRWQQGNVFSCSVMHEALHNHYT
QKSLSLSPGKGGGSGGGSGGGSGGGSGSTGEVQLVESGGGLVQPGGSLRLSCAASGFDFSSSSIHWVRQAPGKGLEWVASISSSYGYT
YYADSVKGRFTISADTSKNTAYLQMNSLRAEDTAVYYCARSWAMDYWGQGTLVTVSSGGGGSDIQMTQSPSSLSASVGDRVTITCRAS
QSVSSAVAWYQQKPGKAPKLLIYSASDLYSGVPSRFSGSRSGTDFTLTISSLQPEDFATYYCQQYAGAGLITFGQGTKVEIK* (SEQ
ID NO: 959)
Mature ANT42i HC hole LALAPS Merchant S-S
EVQLVESGGGLVQPGGSLRLSCAASGFTSDFYFIHWVRQAPGKGLEWVATIYPFIGNTYYADSVKGRFTISADTSKNTAYLQMNSLRA
EDTAVYYCARAFPGSYHPFDYWGQGTLVTVSSASTKGPSVFPLAPSSKSTSGGTAALGCLVKDYFPEPVTVSWNSGALTSGVHTFPAV
LQSSGLYSLSSVVTVPSSSLGTQTYICNVNHKPSNTKVDKKVEPKSCDKTHTCPPCPAPEAAGGPSVFLFPPKPKDTLMISRTPEVTC
VVVDVSHEDPEVKFNWYVDGVEVHNAKTKPREEQYNSTYRVVSVLTVLHQDWLNGKEYKCKVSNKALPASIEKTISKAKGQPREPQVC
TLPPSREEMTKNQVSLSCAVKGFYPSDIAVEWESNGQPENNYKTTPPVLDSDGSFFLVSKLTVDKSRWQQGNVFSCSVMHEALHNHYT
QKSLSLSPGKGGGSGGGSGGGSGGGSGSTGEVQLVESGGGLVQPGGSLRLSCAASGFDFSSSSIHWVRQAPGKGLEWVASISSSYGYT
YYADSVKGRFTISADTSKNTAYLQMNSLRAEDTAVYYCARSWAMDYWGQGTLVTVSSGGGGSDIQMTQSPSSLSASVGDRVTITCRAS
QSVSSAVAWYQQKPGKAPKLLIYSASDLYSGVPSRFSGSRSGTDFTLTISSLQPEDFATYYCQQYAGAGLITFGQGTKVEIK* (SEQ
ID NO: 960)
ANT42i HC knob DANG
MNLLLILTFVAAAVAEVQLVESGGGLVQPGGSLRLSCAASGFTSDFYFIHWVRQAPGKGLEWVATIYPFIGNTYYADSVKGRFTISAD
TSKNTAYLQMNSLRAEDTAVYYCARAFPGSYHPFDYWGQGTLVTVSSASTKGPSVFPLAPSSKSTSGGTAALGCLVKDYFPEPVTVSW
NSGALTSGVHTFPAVLQSSGLYSLSSVVTVPSSSLGTQTYICNVNHKPSNTKVDKKVEPKSCDKTHTCPPCPAPELLGGPSVFLFPPK
PKDTLMISRTPEVTCVVVAVSHEDPEVKFNWYVDGVEVHNAKTKPREEQYGSTYRVVSVLTVLHQDWLNGKEYKCKVSNKALPAPIEK
TISKAKGQPREPMVFDLPPSREEMTKNQVSLWCMVKGFYPSDIAVEWESNGQPENNYKTTPPVLDSDGSFFLYSKLTVDKSRWQQGNV
FSCSVMHEALHNHYTQKSLSLSPGKGGGSGGGSGGGSGGGSGSTGEVQLVESGGGLVQPGGSLRLSCAASGEDFTAYAMHWVRQAPGK
GLEWVASIYPSGGYTAYADSVKGRFTISADTSKNTAYLQMNSLRAEDTAVYYCARRSYYFALDYWGQGTLVTVSSGGGGSDIQMTQSP
SSLSASVGDRVTITCRASQSVSSAVAWYQQKPGKAPKLLIYSASSLYSGVPSRFSGSRSGTDFTLTISSLQPEDFATYYCQQYWAYYS
PITFGQGTKVEIK* (SEQ ID NO: 961)
ANT42i HC Knob LALAPS
MNLLLILTFVAAAVAEVQLVESGGGLVQPGGSLRLSCAASGFTSDFYFIHWVRQAPGKGLEWVATIYPFIGNTYYADSVKGRFTISAD
TSKNTAYLQMNSLRAEDTAVYYCARAFPGSYHPFDYWGQGTLVTVSSASTKGPSVFPLAPSSKSTSGGTAALGCLVKDYFPEPVTVSW
NSGALTSGVHTFPAVLQSSGLYSLSSVVTVPSSSLGTQTYICNVNHKPSNTKVDKKVEPKSCDKTHTCPPCPAPEAAGGPSVFLFPPK
PKDTLMISRTPEVTCVVVDVSHEDPEVKFNWYVDGVEVHNAKTKPREEQYNSTYRVVSVLTVLHQDWLNGKEYKCKVSNKALPASIEK
TISKAKGQPREPMVFDLPPSREEMTKNQVSLWCMVKGFYPSDIAVEWESNGQPENNYKTTPPVLDSDGSFFLYSKLTVDKSRWQQGNV
FSCSVMHEALHNHYTQKSLSLSPGKGGGSGGGSGGGSGGGSGSTGEVQLVESGGGLVQPGGSLRLSCAASGFDFTAYAMHWVRQAPGK
GLEWVASIYPSGGYTAYADSVKGRFTISADTSKNTAYLQMNSLRAEDTAVYYCARRSYYFALDYWGQGTLVTVSSGGGGSDIQMTQSP
SSLSASVGDRVTITCRASQSVSSAVAWYQQKPGKAPKLLIYSASSLYSGVPSRFSGSRSGTDFTLTISSLQPEDFATYYCQQYWAYYS
PITFGQGTKVEIK* (SEQ ID NO: 962)
ANT42i HC Knob LALAPS Merchant
MNLLLILTFVAAAVAEVQLVESGGGLVQPGGSLRLSCAASGFTSDFYFIHWVRQAPGKGLEWVATIYPFIGNTYYADSVKGRFTISAD
TSKNTAYLQMNSLRAEDTAVYYCARAFPGSYHPFDYWGQGTLVTVSSASTKGPSVFPLAPSSKSTSGGTAALGCLVKDYFPEPVTVSW
NSGALTSGVHTFPAVLQSSGLYSLSSVVTVPSSSLGTQTYICNVNHKPSNTKVDKKVEPKSCDKTHTCPPCPAPEAAGGPSVFLFPPK
PKDTLMISRTPEVTCVVVDVSHEDPEVKFNWYVDGVEVHNAKTKPREEQYNSTYRVVSVLTVLHQDWLNGKEYKCKVSNKALPASIEK
TISKAKGQPREPQVYTLPPSREEMTKNQVSLWCLVKGFYPSDIAVEWESNGQPENNYKTTPPVLDSDGSFFLYSKLTVDKSRWQQGNV
FSCSVMHEALHNHYTQKSLSLSPGKGGGSGGGSGGGSGGGSGSTGEVQLVESGGGLVQPGGSLRLSCAASGFDFTAYAMHWVRQAPGK
GLEWVASIYPSGGYTAYADSVKGRFTISADTSKNTAYLQMNSLRAEDTAVYYCARRSYYFALDYWGQGTLVTVSSGGGGSDIQMTQSP
SSLSASVGDRVTITCRASQSVSSAVAWYQQKPGKAPKLLIYSASSLYSGVPSRFSGSRSGTDFTLTISSLQPEDFATYYCQQYWAYYS
PITFGQGTKVEIK* (SEQ ID NO: 963)
ANT42i HC Knob LALAPS Merchant S-S
MNLLLILTFVAAAVAEVQLVESGGGLVQPGGSLRLSCAASGFTSDFYFIHWVRQAPGKGLEWVATIYPFIGNTYYADSVKGRFTISAD
TSKNTAYLQMNSLRAEDTAVYYCARAFPGSYHPFDYWGQGTLVTVSSASTKGPSVFPLAPSSKSTSGGTAALGCLVKDYFPEPVTVSW
NSGALTSGVHTFPAVLQSSGLYSLSSVVTVPSSSLGTQTYICNVNHKPSNTKVDKKVEPKSCDKTHTCPPCPAPEAAGGPSVFLFPPK
PKDTLMISRTPEVTCVVVDVSHEDPEVKFNWYVDGVEVHNAKTKPREEQYNSTYRVVSVLTVLHQDWLNGKEYKCKVSNKALPASIEK
TISKAKGQPREPQVYTLPPCREEMTKNQVSLWCLVKGFYPSDIAVEWESNGQPENNYKTTPPVLDSDGSFFLYSKLTVDKSRWQQGNV
FSCSVMHEALHNHYTQKSLSLSPGKGGGSGGGSGGGSGGGSGSTGEVQLVESGGGLVQPGGSLRLSCAASGFDFTAYAMHWVRQAPGK
GLEWVASIYPSGGYTAYADSVKGRFTISADTSKNTAYLQMNSLRAEDTAVYYCARRSYYFALDYWGQGTLVTVSSGGGGSDIQMTQSP
SSLSASVGDRVTITCRASQSVSSAVAWYQQKPGKAPKLLIYSASSLYSGVPSRFSGSRSGTDFTLTISSLQPEDFATYYCQQYWAYYS
PITFGQGTKVEIK* (SEQ ID NO: 964)
Mature ANT42i HC knob DANG
EVQLVESGGGLVQPGGSLRLSCAASGFTSDFYFIHWVRQAPGKGLEWVATIYPFIGNTYYADSVKGRFTISADTSKNTAYLQMNSLRA
EDTAVYYCARAFPGSYHPFDYWGQGTLVTVSSASTKGPSVFPLAPSSKSTSGGTAALGCLVKDYFPEPVTVSWNSGALTSGVHTFPAV
LQSSGLYSLSSVVTVPSSSLGTQTYICNVNHKPSNTKVDKKVEPKSCDKTHTCPPCPAPELLGGPSVFLFPPKPKDTLMISRTPEVTC
VVVAVSHEDPEVKFNWYVDGVEVHNAKTKPREEQYGSTYRVVSVLTVLHQDWLNGKEYKCKVSNKALPAPIEKTISKAKGQPREPMVF
DLPPSREEMTKNQVSLWCMVKGFYPSDIAVEWESNGQPENNYKTTPPVLDSDGSFFLYSKLTVDKSRWQQGNVFSCSVMHEALHNHYT
QKSLSLSPGKGGGSGGGSGGGSGGGSGSTGEVQLVESGGGLVQPGGSLRLSCAASGFDFTAYAMHWVRQAPGKGLEWVASIYPSGGYT
AYADSVKGRFTISADTSKNTAYLQMNSLRAEDTAVYYCARRSYYFALDYWGQGTLVTVSSGGGGSDIQMTQSPSSLSASVGDRVTITC
RASQSVSSAVAWYQQKPGKAPKLLIYSASSLYSGVPSRFSGSRSGTDFTLTISSLQPEDFATYYCQQYWAYYSPITFGQGTKVEIK*
(SEQ ID NO: 965)
Mature ANT42i HC Knob LALAPS
EVQLVESGGGLVQPGGSLRLSCAASGFTSDFYFIHWVRQAPGKGLEWVATIYPFIGNTYYADSVKGRFTISADTSKNTAYLQMNSLRA
EDTAVYYCARAFPGSYHPFDYWGQGTLVTVSSASTKGPSVFPLAPSSKSTSGGTAALGCLVKDYFPEPVTVSWNSGALTSGVHTFPAV
LQSSGLYSLSSVVTVPSSSLGTQTYICNVNHKPSNTKVDKKVEPKSCDKTHTCPPCPAPEAAGGPSVFLFPPKPKDTLMISRTPEVTC
VVVDVSHEDPEVKFNWYVDGVEVHNAKTKPREEQYNSTYRVVSVLTVLHQDWLNGKEYKCKVSNKALPASIEKTISKAKGQPREPMVF
DLPPSREEMTKNQVSLWCMVKGFYPSDIAVEWESNGQPENNYKTTPPVLDSDGSFFLYSKLTVDKSRWQQGNVFSCSVMHEALHNHYT
QKSLSLSPGKGGGSGGGSGGGSGGGSGSTGEVQLVESGGGLVQPGGSLRLSCAASGEDFTAYAMHWVRQAPGKGLEWVASIYPSGGYT
AYADSVKGRFTISADTSKNTAYLQMNSLRAEDTAVYYCARRSYYFALDYWGQGTLVTVSSGGGGSDIQMTQSPSSLSASVGDRVTITC
RASQSVSSAVAWYQQKPGKAPKLLIYSASSLYSGVPSRFSGSRSGTDFTLTISSLQPEDFATYYCQQYWAYYSPITFGQGTKVEIK*
(SEQ ID NO: 966)
Mature ANT42i HC Knob LALAPS Merchant
EVQLVESGGGLVQPGGSLRLSCAASGFTSDFYFIHWVRQAPGKGLEWVATIYPFIGNTYYADSVKGRFTISADTSKNTAYLQMNSLRA
EDTAVYYCARAFPGSYHPFDYWGQGTLVTVSSASTKGPSVFPLAPSSKSTSGGTAALGCLVKDYFPEPVTVSWNSGALTSGVHTFPAV
LQSSGLYSLSSVVTVPSSSLGTQTYICNVNHKPSNTKVDKKVEPKSCDKTHTCPPCPAPEAAGGPSVFLFPPKPKDTLMISRTPEVTC
VVVDVSHEDPEVKFNWYVDGVEVHNAKTKPREEQYNSTYRVVSVLTVLHQDWLNGKEYKCKVSNKALPASIEKTISKAKGQPREPQVY
TLPPSREEMTKNQVSLWCLVKGFYPSDIAVEWESNGQPENNYKTTPPVLDSDGSFFLYSKLTVDKSRWQQGNVFSCSVMHEALHNHYT
QKSLSLSPGKGGGSGGGSGGGSGGGSGSTGEVQLVESGGGLVQPGGSLRLSCAASGFDFTAYAMHWVRQAPGKGLEWVASIYPSGGYT
AYADSVKGRFTISADTSKNTAYLQMNSLRAEDTAVYYCARRSYYFALDYWGQGTLVTVSSGGGGSDIQMTQSPSSLSASVGDRVTITC
RASQSVSSAVAWYQQKPGKAPKLLIYSASSLYSGVPSRFSGSRSGTDFTLTISSLQPEDFATYYCQQYWAYYSPITFGQGTKVEIK*
(SEQ ID NO: 967)
Mature ANT42i HC Knob LALAPS Merchant S-S
EVQLVESGGGLVQPGGSLRLSCAASGFTSDFYFIHWVRQAPGKGLEWVATIYPFIGNTYYADSVKGRFTISADTSKNTAYLQMNSLRA
EDTAVYYCARAFPGSYHPFDYWGQGTLVTVSSASTKGPSVFPLAPSSKSTSGGTAALGCLVKDYFPEPVTVSWNSGALTSGVHTFPAV
LQSSGLYSLSSVVTVPSSSLGTQTYICNVNHKPSNTKVDKKVEPKSCDKTHTCPPCPAPEAAGGPSVFLFPPKPKDTLMISRTPEVTC
VVVDVSHEDPEVKFNWYVDGVEVHNAKTKPREEQYNSTYRVVSVLTVLHQDWLNGKEYKCKVSNKALPASIEKTISKAKGQPREPQVY
TLPPCREEMTKNQVSLWCLVKGFYPSDIAVEWESNGQPENNYKTTPPVLDSDGSFFLYSKLTVDKSRWQQGNVFSCSVMHEALHNHYT
QKSLSLSPGKGGGSGGGSGGGSGGGSGSTGEVQLVESGGGLVQPGGSLRLSCAASGEDFTAYAMHWVRQAPGKGLEWVASIYPSGGYT
AYADSVKGRFTISADTSKNTAYLQMNSLRAEDTAVYYCARRSYYFALDYWGQGTLVTVSSGGGGSDIQMTQSPSSLSASVGDRVTITC
RASQSVSSAVAWYQQKPGKAPKLLIYSASSLYSGVPSRFSGSRSGTDFTLTISSLQPEDFATYYCQQYWAYYSPITFGQGTKVEIK*
(SEQ ID NO: 968)
ANT42 Hc Hole DANG
MNLLLILTFVAAAVAEVQLVESGGGLVQPGGSLRLSCAASGFDFSSSSIHWVRQAPGKGLEWVASISSSYGYTYYADSVKGRFTISAD
TSKNTAYLQMNSLRAEDTAVYYCARSWAMDYWGQGTLVTVSSGGGGSDIQMTQSPSSLSASVGDRVTITCRASQSVSSAVAWYQQKPG
KAPKLLIYSASDLYSGVPSRFSGSRSGTDFTLTISSLQPEDFATYYCQQYAGAGLITFGQGTKVEIKGGGGSGGGGSEPKSSDKTHTC
PPCPAPELLGGPSVFLFPPKPKDTLMISRTPEVTCVVVAVSHEDPEVKFNWYVDGVEVHNAKTKPREEQYGSTYRVVSVLTVLHQDWL
SFFNGKEYKCKVSNKALPAPIEKTISKAKGQPREPQVYTLPPIRELMTSNQVSLSCAVKGFYPSDIAVEWESNGQPENNYKTTPPVLD
SDGLVSKLTVDKSRWQQGNVFSCSVMHEALHNHYTQKSLSLSPGKGGGSGGGSGGGSGGGSGSTGEVQLVESGGGLVQPGGSLRLSCA
ASGFTSDFYFIHWVRQAPGKGLEWVATIYPFIGNTYYADSVKGRFTISADTSKNTAYLQMNSLRAEDTAVYYCARAFPGSYHPFDYWG
QGTLVTVSSASTKGPSVFPLAPSSKSTSGGTAALGCLVKDYFPEPVTVSWNSGALTSGVHTFPAVLQSSGLYSLSSVVTVPSSSLGTQ
TYICNVNHKPSNTKVDKKVEPKSCDKTHT* (SEQ ID NO: 911)
ANT42 Hc Hole LALAPS
MNLLLILTFVAAAVAEVQLVESGGGLVQPGGSLRLSCAASGFDFSSSSIHWVRQAPGKGLEWVASISSSYGYTYYADSVKGRFTISAD
TSKNTAYLQMNSLRAEDTAVYYCARSWAMDYWGQGTLVTVSSGGGGSDIQMTQSPSSLSASVGDRVTITCRASQSVSSAVAWYQQKPG
KAPKLLIYSASDLYSGVPSRFSGSRSGTDFTLTISSLQPEDFATYYCQQYAGAGLITFGQGTKVEIKGGGGSGGGGSEPKSSDKTHTC
PPCPAPEAAGGPSVFLFPPKPKDTLMISRTPEVTCVVVDVSHEDPEVKFNWYVDGVEVHNAKTKPREEQYNSTYRVVSVLTVLHQDWL
NGKEYKCKVSNKALPASIEKTISKAKGQPREPQVYTLPPIRELMTSNQVSLSCAVKGFYPSDIAVEWESNGQPENNYKTTPPVLDSDG
SFFLVSKLTVDKSRWQQGNVFSCSVMHEALHNHYTQKSLSLSPGKGGGSGGGSGGGSGGGSGSTGEVQLVESGGGLVQPGGSLRLSCA
ASGFTSDFYFIHWVRQAPGKGLEWVATIYPFIGNTYYADSVKGRFTISADTSKNTAYLQMNSLRAEDTAVYYCARAFPGSYHPFDYWG
QGTLVTVSSASTKGPSVFPLAPSSKSTSGGTAALGCLVKDYFPEPVTVSWNSGALTSGVHTFPAVLQSSGLYSLSSVVTVPSSSLGTQ
TYICNVNHKPSNTKVDKKVEPKSCDKTHT* (SEQ ID NO: 969)
ANT42 Hc Hole LALAPS Merchant
MNLLLILTFVAAAVAEVQLVESGGGLVQPGGSLRLSCAASGFDFSSSSIHWVRQAPGKGLEWVASISSSYGYTYYADSVKGRFTISAD
TSKNTAYLQMNSLRAEDTAVYYCARSWAMDYWGQGTLVTVSSGGGGSDIQMTQSPSSLSASVGDRVTITCRASQSVSSAVAWYQQKPG
KAPKLLIYSASDLYSGVPSRFSGSRSGTDFTLTISSLQPEDFATYYCQQYAGAGLITFGQGTKVEIKGGGGSGGGGSEPKSSDKTHTC
PPCPAPEAAGGPSVFLFPPKPKDTLMISRTPEVTCVVVDVSHEDPEVKFNWYVDGVEVHNAKTKPREEQYNSTYRVVSVLTVLHQDWL
NGKEYKCKVSNKALPASIEKTISKAKGQPREPQVYTLPPSREEMTKNQVSLSCAVKGFYPSDIAVEWESNGQPENNYKTTPPVLDSDG
SFFLVSKLTVDKSRWQQGNVFSCSVMHEALHNHYTQKSLSLSPGKGGGSGGGSGGGSGGGSGSTGEVQLVESGGGLVQPGGSLRLSCA
ASGFTSDFYFIHWVRQAPGKGLEWVATIYPFIGNTYYADSVKGRFTISADTSKNTAYLQMNSLRAEDTAVYYCARAFPGSYHPFDYWG
QGTLVTVSSASTKGPSVFPLAPSSKSTSGGTAALGCLVKDYFPEPVTVSWNSGALTSGVHTFPAVLQSSGLYSLSSVVTVPSSSLGTQ
TYICNVNHKPSNTKVDKKVEPKSCDKTHT* (SEQ ID NO: 970)
ANT42 Hc Hole LALAPS Merchant S-S
MNLLLILTFVAAAVAEVQLVESGGGLVQPGGSLRLSCAASGFDFSSSSIHWVRQAPGKGLEWVASISSSYGYTYYADSVKGRFTISAD
TSKNTAYLQMNSLRAEDTAVYYCARSWAMDYWGQGTLVTVSSGGGGSDIQMTQSPSSLSASVGDRVTITCRASQSVSSAVAWYQQKPG
KAPKLLIYSASDLYSGVPSRFSGSRSGTDFTLTISSLQPEDFATYYCQQYAGAGLITFGQGTKVEIKGGGGSGGGGSEPKSSDKTHTC
PPCPAPEAAGGPSVFLFPPKPKDTLMISRTPEVTCVVVDVSHEDPEVKFNWYVDGVEVHNAKTKPREEQYNSTYRVVSVLTVLHQDWL
NGKEYKCKVSNKALPASIEKTISKAKGQPREPQVCTLPPSREEMTKNQVSLSCAVKGFYPSDIAVEWESNGQPENNYKTTPPVLDSDG
SFFLVSKLTVDKSRWQQGNVFSCSVMHEALHNHYTQKSLSLSPGKGGGSGGGSGGGSGGGSGSTGEVQLVESGGGLVQPGGSLRLSCA
ASGFTSDFYFIHWVRQAPGKGLEWVATIYPFIGNTYYADSVKGRFTISADTSKNTAYLQMNSLRAEDTAVYYCARAFPGSYHPFDYWG
QGTLVTVSSASTKGPSVFPLAPSSKSTSGGTAALGCLVKDYFPEPVTVSWNSGALTSGVHTFPAVLQSSGLYSLSSVVTVPSSSLGTQ
TYICNVNHKPSNTKVDKKVEPKSCDKTHT* (SEQ ID NO: 971)
Mature ANT42 Hc Hole DANG
EVQLVESGGGLVQPGGSLRLSCAASGFDFSSSSIHWVRQAPGKGLEWVASISSSYGYTYYADSVKGRFTISADTSKNTAYLQMNSLRA
EDTAVYYCARSWAMDYWGQGTLVTVSSGGGGSDIQMTQSPSSLSASVGDRVTITCRASQSVSSAVAWYQQKPGKAPKLLIYSASDLYS
GVPSRFSGSRSGTDFTLTISSLQPEDFATYYCQQYAGAGLITFGQGTKVEIKGGGGSGGGGSEPKSSDKTHTCPPCPAPELLGGPSVF
LFPPKPKDTLMISRTPEVTCVVVAVSHEDPEVKFNWYVDGVEVHNAKTKPREEQYGSTYRVVSVLTVLHQDWLNGKEYKCKVSNKALP
APIEKTISKAKGQPREPQVYTLPPIRELMTSNQVSLSCAVKGFYPSDIAVEWESNGQPENNYKTTPPVLDSDGSFFLVSKLTVDKSRW
QQGNVFSCSVMHEALHNHYTQKSLSLSPGKGGGSGGGSGGGSGGGSGSTGEVQLVESGGGLVQPGGSLRLSCAASGFTSDFYFIHWVR
QAPGKGLEWVATIYPFIGNTYYADSVKGRFTISADTSKNTAYLQMNSLRAEDTAVYYCARAFPGSYHPFDYWGQGTLVTVSSASTKGP
SVFPLAPSSKSTSGGTAALGCLVKDYFPEPVTVSWNSGALTSGVHTFPAVLQSSGLYSLSSVVTVPSSSLGTQTYICNVNHKPSNTKV
DKKVEPKSCDKTHT* (SEQ ID NO: 972)
Mature ANT42 Hc Hole LALAPS
EVQLVESGGGLVQPGGSLRLSCAASGFDFSSSSIHWVRQAPGKGLEWVASISSSYGYTYYADSVKGRFTISADTSKNTAYLQMNSLRA
EDTAVYYCARSWAMDYWGQGTLVTVSSGGGGSDIQMTQSPSSLSASVGDRVTITCRASQSVSSAVAWYQQKPGKAPKLLIYSASDLYS
GVPSRFSGSRSGTDFTLTISSLQPEDFATYYCQQYAGAGLITFGQGTKVEIKGGGGSGGGGSEPKSSDKTHTCPPCPAPEAAGGPSVF
LFPPKPKDTLMISRTPEVTCVVVDVSHEDPEVKFNWYVDGVEVHNAKTKPREEQYNSTYRVVSVLTVLHQDWLNGKEYKCKVSNKALP
ASIEKTISKAKGQPREPQVYTLPPIRELMTSNQVSLSCAVKGFYPSDIAVEWESNGQPENNYKTTPPVLDSDGSFFLVSKLTVDKSRW
QQGNVFSCSVMHEALHNHYTQKSLSLSPGKGGGSGGGSGGGSGGGSGSTGEVQLVESGGGLVQPGGSLRLSCAASGFTSDFYFIHWVR
QAPGKGLEWVATIYPFIGNTYYADSVKGRFTISADTSKNTAYLQMNSLRAEDTAVYYCARAFPGSYHPFDYWGQGTLVTVSSASTKGP
SVFPLAPSSKSTSGGTAALGCLVKDYFPEPVTVSWNSGALTSGVHTFPAVLQSSGLYSLSSVVTVPSSSLGTQTYICNVNHKPSNTKV
DKKVEPKSCDKTHT* (SEQ ID NO: 973)
Mature ANT42 Hc Hole LALAPS Merchant
EVQLVESGGGLVQPGGSLRLSCAASGFDFSSSSIHWVRQAPGKGLEWVASISSSYGYTYYADSVKGRFTISADTSKNTAYLQMNSLRA
EDTAVYYCARSWAMDYWGQGTLVTVSSGGGGSDIQMTQSPSSLSASVGDRVTITCRASQSVSSAVAWYQQKPGKAPKLLIYSASDLYS
GVPSRFSGSRSGTDFTLTISSLQPEDFATYYCQQYAGAGLITFGQGTKVEIKGGGGSGGGGSEPKSSDKTHTCPPCPAPEAAGGPSVF
LFPPKPKDTLMISRTPEVTCVVVDVSHEDPEVKFNWYVDGVEVHNAKTKPREEQYNSTYRVVSVLTVLHQDWLNGKEYKCKVSNKALP
ASIEKTISKAKGQPREPQVYTLPPSREEMTKNQVSLSCAVKGFYPSDIAVEWESNGQPENNYKTTPPVLDSDGSFFLVSKLTVDKSRW
QQGNVFSCSVMHEALHNHYTQKSLSLSPGKGGGSGGGSGGGSGGGSGSTGEVQLVESGGGLVQPGGSLRLSCAASGFTSDFYFIHWVR
QAPGKGLEWVATIYPFIGNTYYADSVKGRFTISADTSKNTAYLQMNSLRAEDTAVYYCARAFPGSYHPFDYWGQGTLVTVSSASTKGP
SVFPLAPSSKSTSGGTAALGCLVKDYFPEPVTVSWNSGALTSGVHTFPAVLQSSGLYSLSSVVTVPSSSLGTQTYICNVNHKPSNTKV
DKKVEPKSCDKTHT* (SEQ ID NO: 974)
Mature ANT42 Hc Hole LALAPS Merchant S-S
EVQLVESGGGLVQPGGSLRLSCAASGFDFSSSSIHWVRQAPGKGLEWVASISSSYGYTYYADSVKGRFTISADTSKNTAYLQMNSLRA
EDTAVYYCARSWAMDYWGQGTLVTVSSGGGGSDIQMTQSPSSLSASVGDRVTITCRASQSVSSAVAWYQQKPGKAPKLLIYSASDLYS
GVPSRFSGSRSGTDFTLTISSLQPEDFATYYCQQYAGAGLITFGQGTKVEIKGGGGSGGGGSEPKSSDKTHTCPPCPAPEAAGGPSVF
LFPPKPKDTLMISRTPEVTCVVVDVSHEDPEVKFNWYVDGVEVHNAKTKPREEQYNSTYRVVSVLTVLHQDWLNGKEYKCKVSNKALP
ASIEKTISKAKGQPREPQVCTLPPSREEMTKNQVSLSCAVKGFYPSDIAVEWESNGQPENNYKTTPPVLDSDGSFFLVSKLTVDKSRW
QQGNVFSCSVMHEALHNHYTQKSLSLSPGKGGGSGGGSGGGSGGGSGSTGEVQLVESGGGLVQPGGSLRLSCAASGFTSDFYFIHWVR
QAPGKGLEWVATIYPFIGNTYYADSVKGRFTISADTSKNTAYLQMNSLRAEDTAVYYCARAFPGSYHPFDYWGQGTLVTVSSASTKGP
SVFPLAPSSKSTSGGTAALGCLVKDYFPEPVTVSWNSGALTSGVHTFPAVLQSSGLYSLSSVVTVPSSSLGTQTYICNVNHKPSNTKV
DKKVEPKSCDKTHT* (SEQ ID NO: 975)
ANT42 Hc knob DANG
MNLLLILTFVAAAVAEVQLVESGGGLVQPGGSLRLSCAASGFDFTAYAMHWVRQAPGKGLEWVASIYPSGGYTAYADSVKGRFTISAD
TSKNTAYLQMNSLRAEDTAVYYCARRSYYFALDYWGQGTLVTVSSGGGGSDIQMTQSPSSLSASVGDRVTITCRASQSVSSAVAWYQQ
KPGKAPKLLIYSASSLYSGVPSRFSGSRSGTDFTLTISSLQPEDFATYYCQQYWAYYSPITFGQGTKVEIKGGGGSGGGGSEPKSSDK
THTCPPCPAPELLGGPSVFLFPPKPKDTLMISRTPEVTCVVVAVSHEDPEVKFNWYVDGVEVHNAKTKPREEQYGSTYRVVSVLTVLH
QDWLNGKEYKCKVSNKALPAPIEKTISKAKGQPREPMVFDLPPSREEMTKNQVSLWCMVKGFYPSDIAVEWESNGQPENNYKTTPPVL
DSDGSFFLYSKLTVDKSRWQQGNVFSCSVMHEALHNHYTQKSLSLSPGKGGGSGGGSGGGSGGGSGSTGEVQLVESGGGLVQPGGSLR
LSCAASGFTSDFYFIHWVRQAPGKGLEWVATIYPFIGNTYYADSVKGRFTISADTSKNTAYLQMNSLRAEDTAVYYCARAFPGSYHPF
DYWGQGTLVTVSSASTKGPSVFPLAPSSKSTSGGTAALGCLVKDYFPEPVTVSWNSGALTSGVHTFPAVLQSSGLYSLSSVVTVPSSS
LGTQTYICNVNHKPSNTKVDKKVEPKSCDKTHT* (SEQ ID NO: 976)
ANT42 Hc knob LALAPS
MNLLLILTFVAAAVAEVQLVESGGGLVQPGGSLRLSCAASGEDFTAYAMHWVRQAPGKGLEWVASIYPSGGYTAYADSVKGRFTISAD
TSKNTAYLQMNSLRAEDTAVYYCARRSYYFALDYWGQGTLVTVSSGGGGSDIQMTQSPSSLSASVGDRVTITCRASQSVSSAVAWYQQ
KPGKAPKLLIYSASSLYSGVPSRFSGSRSGTDFTLTISSLQPEDFATYYCQQYWAYYSPITFGQGTKVEIKGGGGSGGGGSEPKSSDK
THTCPPCPAPEAAGGPSVFLFPPKPKDTLMISRTPEVTCVVVDVSHEDPEVKFNWYVDGVEVHNAKTKPREEQYNSTYRVVSVLTVLH
QDWLNGKEYKCKVSNKALPASIEKTISKAKGQPREPMVFDLPPSREEMTKNQVSLWCMVKGFYPSDIAVEWESNGQPENNYKTTPPVL
DSDGSFFLYSKLTVDKSRWQQGNVFSCSVMHEALHNHYTQKSLSLSPGKGGGSGGGSGGGSGGGSGSTGEVQLVESGGGLVQPGGSLR
LSCAASGFTSDFYFIHWVRQAPGKGLEWVATIYPFIGNTYYADSVKGRFTISADTSKNTAYLQMNSLRAEDTAVYYCARAFPGSYHPF
DYWGQGTLVTVSSASTKGPSVFPLAPSSKSTSGGTAALGCLVKDYFPEPVTVSWNSGALTSGVHTFPAVLQSSGLYSLSSVVTVPSSS
LGTQTYICNVNHKPSNTKVDKKVEPKSCDKTHT* (SEQ ID NO: 977)
ANT42 Hc knob LALAPS Merchant
MNLLLILTFVAAAVAEVQLVESGGGLVQPGGSLRLSCAASGFDFTAYAMHWVRQAPGKGLEWVASIYPSGGYTAYADSVKGRFTISAD
TSKNTAYLQMNSLRAEDTAVYYCARRSYYFALDYWGQGTLVTVSSGGGGSDIQMTQSPSSLSASVGDRVTITCRASQSVSSAVAWYQQ
KPGKAPKLLIYSASSLYSGVPSRFSGSRSGTDFTLTISSLQPEDFATYYCQQYWAYYSPITFGQGTKVEIKGGGGSGGGGSEPKSSDK
THTCPPCPAPEAAGGPSVFLFPPKPKDTLMISRTPEVTCVVVDVSHEDPEVKFNWYVDGVEVHNAKTKPREEQYNSTYRVVSVLTVLH
QDWLNGKEYKCKVSNKALPASIEKTISKAKGQPREPQVYTLPPSREEMTKNQVSLWCLVKGFYPSDIAVEWESNGQPENNYKTTPPVL
DSDGSFFLYSKLTVDKSRWQQGNVFSCSVMHEALHNHYTQKSLSLSPGKGGGSGGGSGGGSGGGSGSTGEVQLVESGGGLVQPGGSLR
LSCAASGFTSDFYFIHWVRQAPGKGLEWVATIYPFIGNTYYADSVKGRFTISADTSKNTAYLQMNSLRAEDTAVYYCARAFPGSYHPF
DYWGQGTLVTVSSASTKGPSVFPLAPSSKSTSGGTAALGCLVKDYFPEPVTVSWNSGALTSGVHTFPAVLQSSGLYSLSSVVTVPSSS
LGTQTYICNVNHKPSNTKVDKKVEPKSCDKTHT* (SEQ ID NO: 978)
ANT42 Hc knob LALAPS Merchant S-S
MNLLLILTFVAAAVAEVQLVESGGGLVQPGGSLRLSCAASGFDFTAYAMHWVRQAPGKGLEWVASIYPSGGYTAYADSVKGRFTISAD
TSKNTAYLQMNSLRAEDTAVYYCARRSYYFALDYWGQGTLVTVSSGGGGSDIQMTQSPSSLSASVGDRVTITCRASQSVSSAVAWYQQ
KPGKAPKLLIYSASSLYSGVPSRFSGSRSGTDFTLTISSLQPEDFATYYCQQYWAYYSPITFGQGTKVEIKGGGGSGGGGSEPKSSDK
THTCPPCPAPEAAGGPSVFLFPPKPKDTLMISRTPEVTCVVVDVSHEDPEVKFNWYVDGVEVHNAKTKPREEQYNSTYRVVSVLTVLH
QDWLNGKEYKCKVSNKALPASIEKTISKAKGQPREPQVYTLPPCREEMTKNQVSLWCLVKGFYPSDIAVEWESNGQPENNYKTTPPVL
DSDGSFFLYSKLTVDKSRWQQGNVFSCSVMHEALHNHYTQKSLSLSPGKGGGSGGGSGGGSGGGSGSTGEVQLVESGGGLVQPGGSLR
LSCAASGFTSDFYFIHWVRQAPGKGLEWVATIYPFIGNTYYADSVKGRFTISADTSKNTAYLQMNSLRAEDTAVYYCARAFPGSYHPF
DYWGQGTLVTVSSASTKGPSVFPLAPSSKSTSGGTAALGCLVKDYFPEPVTVSWNSGALTSGVHTFPAVLQSSGLYSLSSVVTVPSSS
LGTQTYICNVNHKPSNTKVDKKVEPKSCDKTHT* (SEQ ID NO: 979)
Mature ANT42 Hc knob DANG
EVQLVESGGGLVQPGGSLRLSCAASGEDFTAYAMHWVRQAPGKGLEWVASIYPSGGYTAYADSVKGRFTISADTSKNTAYLQMNSLRA
EDTAVYYCARRSYYFALDYWGQGTLVTVSSGGGGSDIQMTQSPSSLSASVGDRVTITCRASQSVSSAVAWYQQKPGKAPKLLIYSASS
LYSGVPSRFSGSRSGTDFTLTISSLQPEDFATYYCQQYWAYYSPITFGQGTKVEIKGGGGSGGGGSEPKSSDKTHTCPPCPAPELLGG
PSVFLFPPKPKDTLMISRTPEVTCVVVAVSHEDPEVKFNWYVDGVEVHNAKTKPREEQYGSTYRVVSVLTVLHQDWLNGKEYKCKVSN
KALPAPIEKTISKAKGQPREPMVFDLPPSREEMTKNQVSLWCMVKGFYPSDIAVEWESNGQPENNYKTTPPVLDSDGSFFLYSKLTVD
KSRWQQGNVFSCSVMHEALHNHYTQKSLSLSPGKGGGSGGGSGGGSGGGSGSTGEVQLVESGGGLVQPGGSLRLSCAASGFTSDFYFI
HWVRQAPGKGLEWVATIYPFIGNTYYADSVKGRFTISADTSKNTAYLQMNSLRAEDTAVYYCARAFPGSYHPFDYWGQGTLVTVSSAS
TKGPSVFPLAPSSKSTSGGTAALGCLVKDYFPEPVTVSWNSGALTSGVHTFPAVLQSSGLYSLSSVVTVPSSSLGTQTYICNVNHKPS
NTKVDKKVEPKSCDKTHT* (SEQ ID NO: 980)
Mature ANT42 Hc knob LALAPS
EVQLVESGGGLVQPGGSLRLSCAASGFDFTAYAMHWVRQAPGKGLEWVASIYPSGGYTAYADSVKGRFTISADTSKNTAYLQMNSLRA
EDTAVYYCARRSYYFALDYWGQGTLVTVSSGGGGSDIQMTQSPSSLSASVGDRVTITCRASQSVSSAVAWYQQKPGKAPKLLIYSASS
LYSGVPSRFSGSRSGTDFTLTISSLQPEDFATYYCQQYWAYYSPITFGQGTKVEIKGGGGGGGGSEPKSSDKTHTCPPCPAPEAAGGP
SVFLFPPKPKDTLMISRTPEVTCVVVDVSHEDPEVKFNWYVDGVEVHNAKTKPREEQYNSTYRVVSVLTVLHQDWLNGKEYKCKVSNK
ALPASIEKTISKAKGQPREPMVFDLPPSREEMTKNQVSLWCMVKGFYPSDIAVEWESNGQPENNYKTTPPVLDSDGSFFLYSKLTVDK
SRWQQGNVFSCSVMHEALHNHYTQKSLSLSPGKGGGSGGGSGGGSGGGSGSTGEVQLVESGGGLVQPGGSLRLSCAASGFTSDFYFIH
WVRQAPGKGLEWVATIYPFIGNTYYADSVKGRFTISADTSKNTAYLQMNSLRAEDTAVYYCARAFPGSYHPFDYWGQGTLVTVSSAST
KGPSVFPLAPSSKSTSGGTAALGCLVKDYFPEPVTVSWNSGALTSGVHTFPAVLQSSGLYSLSSVVTVPSSSLGTQTYICNVNHKPSN
TKVDKKVEPKSCDKTHT* (SEQ ID NO: 981)
Mature ANT42 Hc knob LALAPS Merchant
EVQLVESGGGLVQPGGSLRLSCAASGFDFTAYAMHWVRQAPGKGLEWVASIYPSGGYTAYADSVKGRFTISADTSKNTAYLQMNSLRA
EDTAVYYCARRSYYFALDYWGQGTLVTVSSGGGGSDIQMTQSPSSLSASVGDRVTITCRASQSVSSAVAWYQQKPGKAPKLLIYSASS
LYSGVPSRFSGSRSGTDFTLTISSLQPEDFATYYCQQYWAYYSPITFGQGTKVEIKGGGGGGGGSEPKSSDKTHTCPPCPAPEAAGGP
SVFLFPPKPKDTLMISRTPEVTCVVVDVSHEDPEVKFNWYVDGVEVHNAKTKPREEQYNSTYRVVSVLTVLHQDWLNGKEYKCKVSNK
ALPASIEKTISKAKGQPREPQVYTLPPSREEMTKNQVSLWCLVKGFYPSDIAVEWESNGQPENNYKTTPPVLDSDGSFFLYSKLTVDK
SRWQQGNVFSCSVMHEALHNHYTQKSLSLSPGKGGGSGGGSGGGSGGGSGSTGEVQLVESGGGLVQPGGSLRLSCAASGFTSDFYFIH
WVRQAPGKGLEWVATIYPFIGNTYYADSVKGRFTISADTSKNTAYLQMNSLRAEDTAVYYCARAFPGSYHPFDYWGQGTLVTVSSAST
KGPSVFPLAPSSKSTSGGTAALGCLVKDYFPEPVTVSWNSGALTSGVHTFPAVLQSSGLYSLSSVVTVPSSSLGTQTYICNVNHKPSN
TKVDKKVEPKSCDKTHT* (SEQ ID NO: 982)
Mature ANT42 Hc knob LALAPS Merchant S-S
EVQLVESGGGLVQPGGSLRLSCAASGEDFTAYAMHWVRQAPGKGLEWVASIYPSGGYTAYADSVKGRFTISADTSKNTAYLQMNSLRA
EDTAVYYCARRSYYFALDYWGQGTLVTVSSGGGGSDIQMTQSPSSLSASVGDRVTITCRASQSVSSAVAWYQQKPGKAPKLLIYSASS
LYSGVPSRFSGSRSGTDFTLTISSLQPEDFATYYCQQYWAYYSPITFGQGTKVEIKGGGGSGGGGSEPKSSDKTHTCPPCPAPEAAGG
PSVFLFPPKPKDTLMISRTPEVTCVVVDVSHEDPEVKFNWYVDGVEVHNAKTKPREEQYNSTYRVVSVLTVLHQDWLNGKEYKCKVSN
KALPASIEKTISKAKGQPREPQVYTLPPCREEMTKNQVSLWCLVKGFYPSDIAVEWESNGQPENNYKTTPPVLDSDGSFFLYSKLTVD
KSRWQQGNVFSCSVMHEALHNHYTQKSLSLSPGKGGGSGGGSGGGSGGGSGSTGEVQLVESGGGLVQPGGSLRLSCAASGFTSDFYFI
HWVRQAPGKGLEWVATIYPFIGNTYYADSVKGRFTISADTSKNTAYLQMNSLRAEDTAVYYCARAFPGSYHPFDYWGQGTLVTVSSAS
TKGPSVFPLAPSSKSTSGGTAALGCLVKDYFPEPVTVSWNSGALTSGVHTFPAVLQSSGLYSLSSVVTVPSSSLGTQTYICNVNHKPS
NTKVDKKVEPKSCDKTHT* (SEQ ID NO: 983)
ANT42 LC
MNLLLILTFVAAAVADIQMTQSPSSLSASVGDRVTITCRASQSVSSAVAWYQQKPGKAPKLLIYSASSLYSGVPSRFSGSRSGTDFTL
TISSLQPEDFATYYCQQSTGSLITFGQGTKVEIKRTVAAPSVFIFPPSDEQLKSGTASVVCLLNNFYPREAKVQWKVDNALQSGNSQE
SVTEQDSKDSTYSLSSTLTLSKADYEKHKVYACEVTHQGLSSPVTKSFNRGEC* (SEQ ID NO: 912)
Mature ANT42 LC
DIQMTQSPSSLSASVGDRVTITCRASQSVSSAVAWYQQKPGKAPKLLIYSASSLYSGVPSRFSGSRSGTDFTLTISSLQPEDFATYYC
QQSTGSLITFGQGTKVEIKRTVAAPSVFIFPPSDEQLKSGTASVVCLLNNFYPREAKVQWKVDNALQSGNSQESVTEQDSKDSTYSLS
STLTLSKADYEKHKVYACEVTHQGLSSPVTKSFNRGEC (SEQ ID NO: 984)
ANT80-1 Hole
MNLLLILTFVAAAVAEVQLVESGGGLVQPGGSLRLSCAASGFTLSYSYIHWVRQAPGKGLEWVASIYSYTGATDYADSVKGRFTISAD
TSKNTAYLQMNSLRAEDTAVYYCARYWSTNRILSYGGMDYWGQGTLVTVSSGGGGSDIQMTQSPSSLSASVGDRVTITCRASQSVSSA
VAWYQQKPGKAPKLLIYSASSLYSGVPSRFSGSRSGTDFTLTISSLQPEDFATYYCQQYFDPITFGQGTKVEIKGGGGSGGGGSEPKS
SDKTHTCPPCPAPELLGGPSVFLFPPKPKDTLMISRTPEVTCVVVAVSHEDPEVKFNWYVDGVEVHNAKTKPREEQYGSTYRVVSVLT
VLHQDWLNGKEYKCKVSNKALPAPIEKTISKAKGQPREPQVYTLPPIRELMTSNQVSLSCAVKGFYPSDIAVEWESNGQPENNYKTTP
PVLDSDGSFFLVSKLTVDKSRWQQGNVFSCSVMHEALHNHYTQKSLSLSPGKGGGSGGGSGGGSGGGSGSTGEVQLVESGGGLVQPGG
SLRLSCAASGENIAYSSMHWVRQAPGKGLEWVATIYPSYSSTYYADSVKGRFTISADTSKNTAYLQMNSLRAEDTAVYYCARYYAMDY
WGQGTLVTVSSASTKGPSVFPLAPSSKSTSGGTAALGCLVKDYFPEPVTVSWNSGALTSGVHTFPAVLQSSGLYSLSSVVTVPSSSLG
TQTYICNVNHKPSNTKVDKKVEPKSCDKTHT (SEQ ID NO: 986)
ANT80-2 Knob
MNLLLILTFVAAAVAEVQLVESGGGLVQPGGSLRLSCAASGFDLSHSSIHWVRQAPGKGLEWVASISSHYGYTHYADSVKGRFTISAD
TSKNTAYLQMNSLRAEDTAVYYCARSSYFPWFFALDYWGQGTLVTVSSGGGGSDIQMTQSPSSLSASVGDRVTITCRASQDVSTAVAW
YQQKPGKAPKLLIYSASFLYSGVPSRFSGSRSGTDFTLTISSLQPEDFATYYCQQHYTTPPTFGQGTKVEIKGGGGSGGGGSEPKTSD
KTHTCPPCPAPELLGGPSVFLFPPKPKDTLMISRTPEVTCVVVAVSHEDPEVKFNWYVDGVEVHNAKTKPREEQYGSTYRVVSVLTVL
HQDWLNGKEYKCKVSNKALPAPIEKTISKAKGQPREPMVFDLPPSREEMTKNQVSLWCMVKGFYPSDIAVEWESNGQPENNYKTTPPV
LDSDGSFFLYSKLTVDKSRWQQGNVFSCSVMHEALHNHYTQKSLSLSPGKGGGSGGGSGGGSGGGSGSTGEVQLVESGGGLVQPGGSL
RLSCAASGENIAYSSMHWVRQAPGKGLEWVATIYPSYSSTYYADSVKGRFTISADTSKNTAYLQMNSLRAEDTAVYYCARYYAMDYWG
QGTLVTVSSASTKGPSVFPLAPSSKSTSGGTAALGCLVKDYFPEPVTVSWNSGALTSGVHTFPAVLQSSGLYSLSSVVTVPSSSLGTQ
TYICNVNHKPSNTKVDKKVEPKSCDKTHT (SEQ ID NO: 987)
ANT98-1 Hole
MNLLLILTFVAAAVAEVQLVESGGGLVQPGGSLRLSCAASGFTLSYSYIHWVRQAPGKGLEWVASIYSYTGATDYADSVKGRFTISAD
TSKNTAYLQMNSLRAEDTAVYYCARYWSTNRILSYGGMDYWGQGTLVTVSSGGGGSDIQMTQSPSSLSASVGDRVTITCRASQSVSSA
VAWYQQKPGKAPKLLIYSASSLYSGVPSRFSGSRSGTDFTLTISSLQPEDFATYYCQQYFDPITFGQGTKVEIKGGGGSGGGGSEPKS
SDKTHTCPPCPAPELLGGPSVFLFPPKPKDTLMISRTPEVTCVVVAVSHEDPEVKFNWYVDGVEVHNAKTKPREEQYGSTYRVVSVLT
VLHQDWLNGKEYKCKVSNKALPAPIEKTISKAKGQPREPQVYTLPPIRELMTSNQVSLSCAVKGFYPSDIAVEWESNGQPENNYKTTP
PVLDSDGSFFLVSKLTVDKSRWQQGNVFSCSVMHEALHNHYTQKSLSLSPGKGGGSGGGSGGGSGGGSGSTGEVQLVESGGGLVQPGG
SLRLSCAASGENIAYSSMHWVRQAPGKGLEWVATIYPSYSSTYYADSVKGRFTISADTSKNTAYLQMNSLRAEDTAVYYCARDYAMDY
WGQGTLVTVSSASTKGPSVFPLAPSSKSTSGGTAALGCLVKDYFPEPVTVSWNSGALTSGVHTFPAVLQSSGLYSLSSVVTVPSSSLG
TQTYICNVNHKPSNTKVDKKVEPKSCDKTHT (SEQ ID NO: 988)
ANT98-2 Knob
MNLLLILTFVAAAVAEVQLVESGGGLVQPGGSLRLSCAASGFDLSHSSIHWVRQAPGKGLEWVASISSHYGYTHYADSVKGRFTISAD
TSKNTAYLQMNSLRAEDTAVYYCARSSYFPWFFALDYWGQGTLVTVSSGGGGSDIQMTQSPSSLSASVGDRVTITCRASQDVSTAVAW
YQQKPGKAPKLLIYSASFLYSGVPSRFSGSRSGTDFTLTISSLQPEDFATYYCQQHYTTPPTFGQGTKVEIKGGGGSGGGGSEPKTSD
KTHTCPPCPAPELLGGPSVFLFPPKPKDTLMISRTPEVTCVVVAVSHEDPEVKFNWYVDGVEVHNAKTKPREEQYGSTYRVVSVLTVL
HQDWLNGKEYKCKVSNKALPAPIEKTISKAKGQPREPMVFDLPPSREEMTKNQVSLWCMVKGFYPSDIAVEWESNGQPENNYKTTPPV
LDSDGSFFLYSKLTVDKSRWQQGNVFSCSVMHEALHNHYTQKSLSLSPGKGGGSGGGSGGGSGGGSGSTGEVQLVESGGGLVQPGGSL
RLSCAASGENIAYSSMHWVRQAPGKGLEWVATIYPSYSSTYYADSVKGRFTISADTSKNTAYLQMNSLRAEDTAVYYCARDYAMDYWG
QGTLVTVSSASTKGPSVFPLAPSSKSTSGGTAALGCLVKDYFPEPVTVSWNSGALTSGVHTFPAVLQSSGLYSLSSVVTVPSSSLGTQ
TYICNVNHKPSNTKVDKKVEPKSCDKTHT (SEQ ID NO: 989)
ANT99-1 Hole
MNLLLILTFVAAAVAEVQLVESGGGLVQPGGSLRLSCAASGFTLSYSYIHWVRQAPGKGLEWVASIYSYTGATDYADSVKGRFTISAD
TSKNTAYLQMNSLRAEDTAVYYCARYWSTNRILSYGGMDYWGQGTLVTVSSGGGGSDIQMTQSPSSLSASVGDRVTITCRASQSVSSA
VAWYQQKPGKAPKLLIYSASSLYSGVPSRFSGSRSGTDFTLTISSLQPEDFATYYCQQYFDPITFGQGTKVEIKGGGGSGGGGSEPKS
SDKTHTCPPCPAPELLGGPSVFLFPPKPKDTLMISRTPEVTCVVVAVSHEDPEVKFNWYVDGVEVHNAKTKPREEQYGSTYRVVSVLT
VLHQDWLNGKEYKCKVSNKALPAPIEKTISKAKGQPREPQVYTLPPIRELMTSNQVSLSCAVKGFYPSDIAVEWESNGQPENNYKTTP
PVLDSDGSFFLVSKLTVDKSRWQQGNVFSCSVMHEALHNHYTQKSLSLSPGKGGGSGGGSGGGSGGGSGSTGEVQLVESGGGLVQPGG
SLRLSCAASGENIAYSSMHWVRQAPGKGLEWVATIYPSYSSTYYADSVKGRFTISADTSKNTAYLQMNSLRAEDTAVYYCARYYDMDY
WGQGTLVTVSSASTKGPSVFPLAPSSKSTSGGTAALGCLVKDYFPEPVTVSWNSGALTSGVHTFPAVLQSSGLYSLSSVVTVPSSSLG
TQTYICNVNHKPSNTKVDKKVEPKSCDKTHT (SEQ ID NO: 990)
ANT99-2 Knob
MNLLLILTFVAAAVAEVQLVESGGGLVQPGGSLRLSCAASGFDLSHSSIHWVRQAPGKGLEWVASISSHYGYTHYADSVKGRFTISAD
TSKNTAYLQMNSLRAEDTAVYYCARSSYFPWFFALDYWGQGTLVTVSSGGGGSDIQMTQSPSSLSASVGDRVTITCRASQDVSTAVAW
YQQKPGKAPKLLIYSASFLYSGVPSRFSGSRSGTDFTLTISSLQPEDFATYYCQQHYTTPPTFGQGTKVEIKGGGGSGGGGSEPKTSD
KTHTCPPCPAPELLGGPSVFLFPPKPKDTLMISRTPEVTCVVVAVSHEDPEVKFNWYVDGVEVHNAKTKPREEQYGSTYRVVSVLTVL
HQDWLNGKEYKCKVSNKALPAPIEKTISKAKGQPREPMVFDLPPSREEMTKNQVSLWCMVKGFYPSDIAVEWESNGQPENNYKTTPPV
LDSDGSFFLYSKLTVDKSRWQQGNVFSCSVMHEALHNHYTQKSLSLSPGKGGGSGGGSGGGSGGGSGSTGEVQLVESGGGLVQPGGSL
RLSCAASGFNIAYSSMHWVRQAPGKGLEWVATIYPSYSSTYYADSVKGRFTISADTSKNTAYLQMNSLRAEDTAVYYCARYYDMDYWG
QGTLVTVSSASTKGPSVFPLAPSSKSTSGGTAALGCLVKDYFPEPVTVSWNSGALTSGVHTFPAVLQSSGLYSLSSVVTVPSSSLGTQ
TYICNVNHKPSNTKVDKKVEPKSCDKTHT (SEQ ID NO: 991)
ANT80 ANT98 ANT99 LC
MNLLLILTFVAAAVADIQMTQSPSSLSASVGDRVTITCRASQSVSSAVAWYQQKPGKAPKLLIYSASSLYSGVPSRFSGSRSGTDFTL
TISSLQPEDFATYYCQQAHYFPITFGQGTKVEIKRTVAAPSVFIFPPSDEQLKSGTASVVCLLNNFYPREAKVQWKVDNALQSGNSQE
SVTEQDSKDSTYSLSSTLTLSKADYEKHKVYACEVTHQGLSSPVTKSFNRGEC (SEQ ID NO: 992)
CM0042 (Dia-Fc-Dia)
MNLLLILTFVAAAVAEFEVQLVESGGGLVQPGGSLRLSCAASGFNIGSSSIHWVRQAPGKGLEWVASIYSAFASTSYADSVKGRFTIS
ADTSKNTAYLQMNSLRAEDTAVYYCARYHFPFGFALDYWGQGTLVTVSSGGGGSDIQMTQSPSSLSASVGDRVTITCRASQSVSSAVA
WYQQKPGKAPKLLIYSASSLYSGVPSRFSGSRSGTDFTLTISSLQPEDFATYYCQQGVYLFTFGQGTKVEIKLEDKTHTKVEPKSSDK
THTCPPCPAPELLGGPSVFLFPPKPKDTLMISRTPEVTCVVVDVSHEDPEVKFNWYVDGVEVHNAKTKPREEQYNSTYRVVSVLTVLH
QDWLNGKEYKCKVSNKALPAPIEKTISKAKGQPREPQVYTLPPSREEMTKNQVSLTCLVKGFYPSDIAVEWESNGQPENNYKTTPPVL
DSDGSFFLYSKLTVDKSRWQQGNVFSCSVMHEALHNHYTQKSLSLSPGKSGSETPGTSESATPESGGGEVQLVESGGGLVQPGGSLRL
SCAASGFNISYSSIHWVRQAPGKGLEWVAYISSYYGYTYYADSVKGRFTISADTSKNTAYLQMNSLRAEDTAVYYCARAHYFPWAGAM
DYWGQGTLVTVSSGGGGSDIQMTQSPSSLSASVGDRVTITCRASQSVSSAVAWYQQKPGKAPKLLIYSASSLYSGVPSRFSGSRSGTD
FTLTISSLQPEDFATYYCQQYSWGPFTFGQGTKVEIK (SEQ ID NO: 993)
CM0011 Hole (Dia-Fc-Dia)
MNLLLILTFVAAAVAEFEVQLVESGGGLVQPGGSLRLSCAASGFNIGSSSIHWVRQAPGKGLEWVASIYSAFASTSYADSVKGRFTIS
ADTSKNTAYLQMNSLRAEDTAVYYCARYHFPFGFALDYWGQGTLVTVSSGGGGSDIQMTQSPSSLSASVGDRVTITCRASQSVSSAVA
WYQQKPGKAPKLLIYSASSLYSGVPSRFSGSRSGTDFTLTISSLQPEDFATYYCQQGVYLFTFGQGTKVEIKLEDKTHTKVEPKSSDK
THNCPPCPAPELLGGPSVFLFPPKPKDTLMISRTPEVTCVVVDVSHEDPEVKFNWYVDGVEVHNAKTKPREEQYNSTYRVVSVLTVLH
QDWLNGKEYKCKVSNKALPAPIEKTISKAKGQPREPQVYTLPPIRELMTSNQVSLSCAVKGFYPSDIAVEWESNGQPENNYKTTPPVL
DSDGSFFLVSKLTVDKSRWQQGNVFSCSVMHEALHNHYTQKSLSLSPGKSGSETPGTSESATPESGGGEVQLVESGGGLVQPGGSLRL
SCAASGFNISSYYIHWVRQAPGKGLEWVASIYSSYGYTSYADSVKGRFTISADTSKNTAYLQMNSLRAEDTAVYYCARTVRGSKKPYE
SGWAMDYWGQGTLVTVSSGGGGSDIQMTQSPSSLSASVGDRVTITCRASQSVSSAVAWYQQKPGKAPKLLIYSASSLYSGVPSRFSGS
RSGTDFTLTISSLQPEDFATYYCQQYSWGPFTFGQGTKVEIK (SEQ ID NO: 994)
CM0011 Knob (Dia-Fc-Dia)
MNLLLILTFVAAAVAEFEVQLVESGGGLVQPGGSLRLSCAASGFNIGSSSIHWVRQAPGKGLEWVASIYSAFASTSYADSVKGRFTIS
ADTSKNTAYLQMNSLRAEDTAVYYCARYHFPFGFALDYWGQGTLVTVSSGGGGSDIQMTQSPSSLSASVGDRVTITCRASQSVSSAVA
WYQQKPGKAPKLLIYSASSLYSGVPSRFSGSRSGTDFTLTISSLQPEDFATYYCQQGVYLFTFGQGTKVEIKLEDKTHTKVEPKTSDK
THTCPPCPAPELLGGPSVFLFPPKPKDTLMISRTPEVTCVVVDVSHEDPEVKFNWYVDGVEVHNAKTKPREEQYNSTYRVVSVLTVLH
QDWLNGKEYKCKVSNKALPAPIEKTISKAKGQPREPMVFDLPPSREEMTKNQVSLWCMVKGFYPSDIAVEWESNGQPENNYKTTPPVL
DSDGSFFLYSKLTVDKSRWQQGNVFSCSVMHEALHNHYTQKSLSLSPGKSGSETPGTSESATPESGGGEVQLVESGGGLVQPGGSLRL
SCAASGFNISYSSIHWVRQAPGKGLEWVAYISSYYGYTYYADSVKGRFTISADTSKNTAYLQMNSLRAEDTAVYYCARAHYFPWAGAM
DYWGQGTLVTVSSGGGGSDIQMTQSPSSLSASVGDRVTITCRASQSVSSAVAWYQQKPGKAPKLLIYSASSLYSGVPSRFSGSRSGTD
FTLTISSLQPEDFATYYCQQYYWPITFGQGTKVEIK (SEQ ID NO: 995)
CM0126 Hole (Dia-Fc-Dia)
MNLLLILTFVAAAVAEFEVQLVESGGGLVQPGGSLRLSCAASGFNIHSSSIHWVRQAPGKGLEWVAATYSSFGSITYADSVKGRFTIS
ADTSKNTAYLQMNSLRAEDTAVYYCARYHHPFGYALDYWGQGTLVTVSSGGGGSDIQMTQSPSSLSASVGDRVTITCRASQSVSSAVA
WYQQKPGKAPKLLIYSASSLYSGVPSRFSGSRSGTDFTLTISSLQPEDFATYYCQQGVYLFTFGQGTKVEIKLEDKTHTKVEPKSSDK
THNCPPCPAPELLGGPSVFLFPPKPKDTLMISRTPEVTCVVVDVSHEDPEVKFNWYVDGVEVHNAKTKPREEQYNSTYRVVSVLTVLH
QDWLNGKEYKCKVSNKALPAPIEKTISKAKGQPREPQVYTLPPIRELMTSNQVSLSCAVKGFYPSDIAVEWESNGQPENNYKTTPPVL
DSDGSFFLVSKLTVDKSRWQQGNVFSCSVMHEALHNHYTQKSLSLSPGKSGSETPGTSESATPESGGGEVQLVESGGGLVQPGGSLRL
SCAASGFNISSYYIHWVRQAPGKGLEWVASIYSSYGYTSYADSVKGRFTISADTSKNTAYLQMNSLRAEDTAVYYCARTVRGSKKPYF
SGWAMDYWGQGTLVTVSSGGGGSDIQMTQSPSSLSASVGDRVTITCRASQSVSSAVAWYQQKPGKAPKLLIYSASSLYSGVPSRFSGS
RSGTDFTLTISSLQPEDFATYYCQQYSWGPFTFGQGTKVEIK (SEQ ID NO: 996)
CM0126 Knob (Dia-Fc-Dia)
MNLLLILTFVAAAVAEFEVQLVESGGGLVQPGGSLRLSCAASGFNIHSSSIHWVRQAPGKGLEWVAATYSSFGSITYADSVKGRFTIS
ADTSKNTAYLQMNSLRAEDTAVYYCARYHHPFGYALDYWGQGTLVTVSSGGGGSDIQMTQSPSSLSASVGDRVTITCRASQSVSSAVA
WYQQKPGKAPKLLIYSASSLYSGVPSRFSGSRSGTDFTLTISSLQPEDFATYYCQQGVYLFTFGQGTKVEIKLEDKTHTKVEPKTSDK
THTCPPCPAPELLGGPSVFLFPPKPKDTLMISRTPEVTCVVVDVSHEDPEVKFNWYVDGVEVHNAKTKPREEQYNSTYRVVSVLTVLH
QDWLNGKEYKCKVSNKALPAPIEKTISKAKGQPREPMVFDLPPSREEMTKNQVSLWCMVKGFYPSDIAVEWESNGQPENNYKTTPPVL
DSDGSFFLYSKLTVDKSRWQQGNVFSCSVMHEALHNHYTQKSLSLSPGKSGSETPGTSESATPESGGGEVQLVESGGGLVQPGGSLRL
SCAASGFNISYSSIHWVRQAPGKGLEWVAYISSYYGYTYYADSVKGRFTISADTSKNTAYLQMNSLRAEDTAVYYCARAHYFPWAGAM
DYWGQGTLVTVSSGGGGSDIQMTQSPSSLSASVGDRVTITCRASQSVSSAVAWYQQKPGKAPKLLIYSASSLYSGVPSRFSGSRSGTD
FTLTISSLQPEDFATYYCQQYYWPITFGQGTKVEIK (SEQ ID NO: 997)
CM0107 Hole (Dia-Fc-scFv)
MNLLLILTFVAAAVAEFEVQLVESGGGLVQPGGSLRLSCAASGFNIGSSSIHWVRQAPGKGLEWVASIYSAFASTSYADSVKGRFTIS
ADTSKNTAYLQMNSLRAEDTAVYYCARYHFPFGFALDYWGQGTLVTVSSGGGGSDIQMTQSPSSLSASVGDRVTITCRASQSVSSAVA
WYQQKPGKAPKLLIYSASSLYSGVPSRFSGSRSGTDFTLTISSLQPEDFATYYCQQGVYLFTFGQGTKVEIKLEDKTHTKVEPKSSDK
THNCPPCPAPELLGGPSVFLFPPKPKDTLMISRTPEVTCVVVDVSHEDPEVKFNWYVDGVEVHNAKTKPREEQYNSTYRVVSVLTVLH
QDWLNGKEYKCKVSNKALPAPIEKTISKAKGQPREPQVYTLPPIRELMTSNQVSLSCAVKGFYPSDIAVEWESNGQPENNYKTTPPVL
DSDGSFFLVSKLTVDKSRWQQGNVFSCSVMHEALHNHYTQKSLSLSPGKSGSETPGTSESATPESGGGDIQMTQSPSSLSASVGDRVT
ITCRASQSVSSAVAWYQQKPGKAPKLLIYSASSLYSGVPSRFSGSRSGTDFTLTISSLQPEDFATYYCQQYSWGPFTFGQGTKVEIKG
TTAASGSSGGSSSGAEVQLVESGGGLVQPGGSLRLSCAASGFNISYSSIHWVRQAPGKGLEWVAYISSYYGYTYYADSVKGRFTISAD
TSKNTAYLQMNSLRAEDTAVYYCARAHYFPWAGAMDYWGQGTLVTVSS (SEQ ID NO: 998)
CM0107 Knob (Dia-Fc-scFv)
MNLLLILTFVAAAVAEFEVQLVESGGGLVQPGGSLRLSCAASGFNIGSSSIHWVRQAPGKGLEWVASIYSAFASTSYADSVKGRFTIS
ADTSKNTAYLQMNSLRAEDTAVYYCARYHFPFGFALDYWGQGTLVTVSSGGGGSDIQMTQSPSSLSASVGDRVTITCRASQSVSSAVA
WYQQKPGKAPKLLIYSASSLYSGVPSRFSGSRSGTDFTLTISSLQPEDFATYYCQQGVYLFTFGQGTKVEIKLEDKTHTKVEPKTSDK
THTCPPCPAPELLGGPSVFLFPPKPKDTLMISRTPEVTCVVVDVSHEDPEVKFNWYVDGVEVHNAKTKPREEQYNSTYRVVSVLTVLH
QDWLNGKEYKCKVSNKALPAPIEKTISKAKGQPREPMVFDLPPSREEMTKNQVSLWCMVKGFYPSDIAVEWESNGQPENNYKTTPPVL
DSDGSFFLYSKLTVDKSRWQQGNVFSCSVMHEALHNHYTQKSLSLSPGKSGSETPGTSESATPESGGGDIQMTQSPSSLSASVGDRVT
ITCRASQSVSSAVAWYQQKPGKAPKLLIYSASSLYSGVPSRFSGSRSGTDFTLTISSLQPEDFATYYCQQYSWGPFTFGQGTKVEIKG
TTAASGSSGGSSSGAEVQLVESGGGLVQPGGSLRLSCAASGFNISYSSIHWVRQAPGKGLEWVAYISSYYGYTYYADSVKGRFTISAD
TSKNTAYLQMNSLRAEDTAVYYCARAHYFPWAGAMDYWGQGTLVTVSS (SEQ ID NO: 999)
CM0108 Hole (Dia-Fc-scFv)
MNLLLILTFVAAAVAEFEVQLVESGGGLVQPGGSLRLSCAASGFNIGSSSIHWVRQAPGKGLEWVASIYSAFASTSYADSVKGRFTIS
ADTSKNTAYLQMNSLRAEDTAVYYCARYHFPFGFALDYWGQGTLVTVSSGGGGSDIQMTQSPSSLSASVGDRVTITCRASQSVSSAVA
WYQQKPGKAPKLLIYSASSLYSGVPSRFSGSRSGTDFTLTISSLQPEDFATYYCQQGVYLFTFGQGTKVEIKLEDKTHTKVEPKSSDK
THNCPPCPAPELLGGPSVFLFPPKPKDTLMISRTPEVTCVVVDVSHEDPEVKFNWYVDGVEVHNAKTKPREEQYNSTYRVVSVLTVLH
QDWLNGKEYKCKVSNKALPAPIEKTISKAKGQPREPQVYTLPPIRELMTSNQVSLSCAVKGFYPSDIAVEWESNGQPENNYKTTPPVL
DSDGSFFLVSKLTVDKSRWQQGNVFSCSVMHEALHNHYTQKSLSLSPGKSGSETPGTSESATPESGGGDIQMTQSPSSLSASVGDRVT
ITCRASQSVSSAVAWYQQKPGKAPKLLIYSASSLYSGVPSRFSGSRSGTDFTLTISSLQPEDFATYYCQQYYWPITFGQGTKVEIKGT
TAASGSSGGSSSGAEVQLVESGGGLVQPGGSLRLSCAASGFNISSYYIHWVRQAPGKGLEWVASIYSSYGYTSYADSVKGRFTISADT
SKNTAYLQMNSLRAEDTAVYYCARTVRGSKKPYFSGWAMDYWGQGTLVTVSS (SEQ ID NO: 1000)
CM0108 Knob (Dia-Fc-scFv)
MNLLLILTFVAAAVAEFEVQLVESGGGLVQPGGSLRLSCAASGFNIGSSSIHWVRQAPGKGLEWVASIYSAFASTSYADSVKGRFTIS
ADTSKNTAYLQMNSLRAEDTAVYYCARYHFPFGFALDYWGQGTLVTVSSGGGGSDIQMTQSPSSLSASVGDRVTITCRASQSVSSAVA
WYQQKPGKAPKLLIYSASSLYSGVPSRFSGSRSGTDFTLTISSLQPEDFATYYCQQGVYLFTFGQGTKVEIKLEDKTHTKVEPKTSDK
THTCPPCPAPELLGGPSVFLFPPKPKDTLMISRTPEVTCVVVDVSHEDPEVKFNWYVDGVEVHNAKTKPREEQYNSTYRVVSVLTVLH
QDWLNGKEYKCKVSNKALPAPIEKTISKAKGQPREPMVFDLPPSREEMTKNQVSLWCMVKGFYPSDIAVEWESNGQPENNYKTTPPVL
DSDGSFFLYSKLTVDKSRWQQGNVFSCSVMHEALHNHYTQKSLSLSPGKSGSETPGTSESATPESGGGDIQMTQSPSSLSASVGDRVT
ITCRASQSVSSAVAWYQQKPGKAPKLLIYSASSLYSGVPSRFSGSRSGTDFTLTISSLQPEDFATYYCQQYYWPITFGQGTKVEIKGT
TAASGSSGGSSSGAEVQLVESGGGLVQPGGSLRLSCAASGFNISSYYIHWVRQAPGKGLEWVASIYSSYGYTSYADSVKGRFTISADT
SKNTAYLQMNSLRAEDTAVYYCARTVRGSKKPYFSGWAMDYWGQGTLVTVSS (SEQ ID NO: 1001)
CM0108 Hole (Dia-Fc-scFv)
MNLLLILTFVAAAVAEFEVQLVESGGGLVQPGGSLRLSCAASGFNIGSSSIHWVRQAPGKGLEWVASIYSAFASTSYADSVKGRFTIS
ADTSKNTAYLQMNSLRAEDTAVYYCARYHFPFGFALDYWGQGTLVTVSSGGGGSDIQMTQSPSSLSASVGDRVTITCRASQSVSSAVA
WYQQKPGKAPKLLIYSASSLYSGVPSRFSGSRSGTDFTLTISSLQPEDFATYYCQQGVYLFTFGQGTKVEIKLEDKTHTKVEPKSSDK
THNCPPCPAPELLGGPSVFLFPPKPKDTLMISRTPEVTCVVVDVSHEDPEVKFNWYVDGVEVHNAKTKPREEQYNSTYRVVSVLTVLH
QDWLNGKEYKCKVSNKALPAPIEKTISKAKGQPREPQVYTLPPIRELMTSNQVSLSCAVKGFYPSDIAVEWESNGQPENNYKTTPPVL
DSDGSFFLVSKLTVDKSRWQQGNVFSCSVMHEALHNHYTQKSLSLSPGKSGSETPGTSESATPESGGGDIQMTQSPSSLSASVGDRVT
ITCRASQSVSSAVAWYQQKPGKAPKLLIYSASSLYSGVPSRFSGSRSGTDFTLTISSLQPEDFATYYCQQYYWPITFGQGTKVEIKGT
TAASGSSGGSSSGAEVQLVESGGGLVQPGGSLRLSCAASGFNISSYYIHWVRQAPGKGLEWVASIYSSYGYTSYADSVKGRFTISADT
SKNTAYLQMNSLRAEDTAVYYCARTVRGSKKPYFSGWAMDYWGQGTLVTVSS (SEQ ID NO: 1000)
CM0108 Knob (Dia-Fc-scFv)
MNLLLILTFVAAAVAEFEVQLVESGGGLVQPGGSLRLSCAASGFNIGSSSIHWVRQAPGKGLEWVASIYSAFASTSYADSVKGRFTIS
ADTSKNTAYLQMNSLRAEDTAVYYCARYHFPFGFALDYWGQGTLVTVSSGGGGSDIQMTQSPSSLSASVGDRVTITCRASQSVSSAVA
WYQQKPGKAPKLLIYSASSLYSGVPSRFSGSRSGTDFTLTISSLQPEDFATYYCQQGVYLFTFGQGTKVEIKLEDKTHTKVEPKTSDK
THTCPPCPAPELLGGPSVFLFPPKPKDTLMISRTPEVTCVVVDVSHEDPEVKFNWYVDGVEVHNAKTKPREEQYNSTYRVVSVLTVLH
QDWLNGKEYKCKVSNKALPAPIEKTISKAKGQPREPMVFDLPPSREEMTKNQVSLWCMVKGFYPSDIAVEWESNGQPENNYKTTPPVL
DSDGSFFLYSKLTVDKSRWQQGNVFSCSVMHEALHNHYTQKSLSLSPGKSGSETPGTSESATPESGGGDIQMTQSPSSLSASVGDRVT
ITCRASQSVSSAVAWYQQKPGKAPKLLIYSASSLYSGVPSRFSGSRSGTDFTLTISSLQPEDFATYYCQQYYWPITFGQGTKVEIKGT
TAASGSSGGSSSGAEVQLVESGGGLVQPGGSLRLSCAASGFNISSYYIHWVRQAPGKGLEWVASIYSSYGYTSYADSVKGRFTISADT
SKNTAYLQMNSLRAEDTAVYYCARTVRGSKKPYFSGWAMDYWGQGTLVTVSS (SEQ ID NO: 1001)
CM0109 Hole (Dia-Fc-scFv)
MNLLLILTFVAAAVAEFEVQLVESGGGLVQPGGSLRLSCAASGFNIGSSSIHWVRQAPGKGLEWVASIYSAFASTSYADSVKGRFTIS
ADTSKNTAYLQMNSLRAEDTAVYYCARYHFPFGFALDYWGQGTLVTVSSGGGGSDIQMTQSPSSLSASVGDRVTITCRASQSVSSAVA
WYQQKPGKAPKLLIYSASSLYSGVPSRFSGSRSGTDFTLTISSLQPEDFATYYCQQGVYLFTFGQGTKVEIKLEDKTHTKVEPKSSDK
THNCPPCPAPELLGGPSVFLFPPKPKDTLMISRTPEVTCVVVDVSHEDPEVKFNWYVDGVEVHNAKTKPREEQYNSTYRVVSVLTVLH
QDWLNGKEYKCKVSNKALPAPIEKTISKAKGQPREPQVYTLPPIRELMTSNQVSLSCAVKGFYPSDIAVEWESNGQPENNYKTTPPVL
DSDGSFFLVSKLTVDKSRWQQGNVFSCSVMHEALHNHYTQKSLSLSPGKSGSETPGTSESATPESGGGDIQMTQSPSSLSASVGDRVT
ITCRASQSVSSAVAWYQQKPGKAPKLLIYSASSLYSGVPSRFSGSRSGTDFTLTISSLQPEDFATYYCQQYYWPITFGQGTKVEIKGT
TAASGSSGGSSSGAEVQLVESGGGLVQPGGSLRLSCAASGFNISSYYIHWVRQAPGKGLEWVASIYSSYGYTSYADSVKGRFTISADT
SKNTAYLQMNSLRAEDTAVYYCARTVRGSKKPYFSGWAMDYWGQGTLVTVSS (SEQ ID NO: 1000)
CM0109 Knob (Dia-Fc-scFv)
MNLLLILTFVAAAVAEFEVQLVESGGGLVQPGGSLRLSCAASGFNIGSSSIHWVRQAPGKGLEWVASIYSAFASTSYADSVKGRFTIS
ADTSKNTAYLQMNSLRAEDTAVYYCARYHFPFGFALDYWGQGTLVTVSSGGGGSDIQMTQSPSSLSASVGDRVTITCRASQSVSSAVA
WYQQKPGKAPKLLIYSASSLYSGVPSRFSGSRSGTDFTLTISSLQPEDFATYYCQQGVYLFTFGQGTKVEIKLEDKTHTKVEPKTSDK
THTCPPCPAPELLGGPSVFLFPPKPKDTLMISRTPEVTCVVVDVSHEDPEVKFNWYVDGVEVHNAKTKPREEQYNSTYRVVSVLTVLH
QDWLNGKEYKCKVSNKALPAPIEKTISKAKGQPREPMVFDLPPSREEMTKNQVSLWCMVKGFYPSDIAVEWESNGQPENNYKTTPPVL
DSDGSFFLYSKLTVDKSRWQQGNVFSCSVMHEALHNHYTQKSLSLSPGKSGSETPGTSESATPESGGGDIQMTQSPSSLSASVGDRVT
ITCRASQSVSSAVAWYQQKPGKAPKLLIYSASSLYSGVPSRFSGSRSGTDFTLTISSLQPEDFATYYCQQYSWGPFTFGQGTKVEIKG
TTAASGSSGGSSSGAEVQLVESGGGLVQPGGSLRLSCAASGFNISYSSIHWVRQAPGKGLEWVAYISSYYGYTYYADSVKGRFTISAD
TSKNTAYLQMNSLRAEDTAVYYCARAHYFPWAGAMDYWGQGTLVTVSS (SEQ ID NO: 999)
CT003 Hole (Dia-Fc-scFv)
MNLLLILTFVAAAVAEFEVQLVESGGGLVQPGGSLRLSCAASGFNISSYYIHWVRQAPGKGLEWVASIYSSYGYTSYADSVKGRFTIS
ADTSKNTAYLQMNSLRAEDTAVYYCARTVRGSKKPYFSGWAMDYWGQGTLVTVSSGGGGSDIQMTQSPSSLSASVGDRVTITCRASQS
VSSAVAWYQQKPGKAPKLLIYSASSLYSGVPSRFSGSRSGTDFTLTISSLQPEDFATYYCQQYSWGPFTFGQGTKVEIKLEDKTHTKV
EPKSSDKTHNCPPCPAPELLGGPSVFLFPPKPKDTLMISRTPEVTCVVVDVSHEDPEVKFNWYVDGVEVHNAKTKPREEQYNSTYRVV
SVLTVLHQDWLNGKEYKCKVSNKALPAPIEKTISKAKGQPREPQVYTLPPIRELMTSNQVSLSCAVKGFYPSDIAVEWESNGQPENNY
KTTPPVLDSDGSFFLVSKLTVDKSRWQQGNVFSCSVMHEALHNHYTQKSLSLSPGKSGSETPGTSESATPESGGGEVQLVESGGGLVQ
PGGSLRLSCAASGFNIHSSSIHWVRQAPGKGLEWVAATYSSFGSITYADSVKGRFTISADTSKNTAYLQMNSLRAEDTAVYYCARYHH
PFGYALDYWGQGTLVTVSSGTTAASGSSGGSSSGADIQMTQSPSSLSASVGDRVTITCRASQSVSSAVAWYQQKPGKAPKLLIYSASS
LYSGVPSRFSGSRSGTDFTLTISSLQPEDFATYYCQQGVYLFTFGQGTKVEIK (SEQ ID NO: 1002)
CT003 Knob (Dia-Fc-scFv)
MNLLLILTFVAAAVAEFEVQLVESGGGLVQPGGSLRLSCAASGFNISYSSIHWVRQAPGKGLEWVAYISSYYGYTYYADSVKGRFTIS
ADTSKNTAYLQMNSLRAEDTAVYYCARAHYFPWAGAMDYWGQGTLVTVSSGGGGDIQMTQSPSSLSASVGDRVTITCRASQSVSSAVA
WYQQKPGKAPKLLIYSASSLYSGVPSRFSGSRSGTDFTLTISSLQPEDFATYYCQQYYWPITFGQGTKVEIKLEDKTHTKVEPKTSDK
THTCPPCPAPELLGGPSVFLFPPKPKDTLMISRTPEVTCVVVDVSHEDPEVKFNWYVDGVEVHNAKTKPREEQYNSTYRVVSVLTVLH
QDWLNGKEYKCKVSNKALPAPIEKTISKAKGQPREPMVFDLPPSREEMTKNQVSLWCMVKGFYPSDIAVEWESNGQPENNYKTTPPVL
DSDGSFFLYSKLTVDKSRWQQGNVFSCSVMHEALHNHYTQKSLSLSPGKSGSETPGTSESATPESGGGEVQLVESGGGLVQPGGSLRL
SCAASGFNIHSSSIHWVRQAPGKGLEWVAATYSSFGSITYADSVKGRFTISADTSKNTAYLQMNSLRAEDTAVYYCARYHHPFGYALD
YWGQGTLVTVSSGTTAASGSSGGSSSGADIQMTQSPSSLSASVGDRVTITCRASQSVSSAVAWYQQKPGKAPKLLIYSASSLYSGVPS
RFSGSRSGTDFTLTISSLQPEDFATYYCQQGVYLFTFGQGTKVEIK (SEQ ID NO: 1003)
CM0112 Hole (scFv-Fc-Dia)
MNLLLILTFVAAAVAEFDIQMTQSPSSLSASVGDRVTITCRASQSVSSAVAWYQQKPGKAPKLLIYSASSLYSGVPSRFSGSRSGTDF
TLTISSLQPEDFATYYCQQGVYLFTFGQGTKVEIKGTTAASGSSGGSSSGAEVQLVESGGGLVQPGGSLRLSCAASGFNIGSSSIHWV
RQAPGKGLEWVASIYSAFASTSYADSVKGRFTISADTSKNTAYLQMNSLRAEDTAVYYCARYHFPFGFALDYWGQGTLVTVSSLEDKT
HTKVEPKSSDKTHNCPPCPAPELLGGPSVFLFPPKPKDTLMISRTPEVTCVVVDVSHEDPEVKFNWYVDGVEVHNAKTKPREEQYNST
YRVVSVLTVLHQDWLNGKEYKCKVSNKALPAPIEKTISKAKGQPREPQVYTLPPIRELMTSNQVSLSCAVKGFYPSDIAVEWESNGQP
ENNYKTTPPVLDSDGSFFLVSKLTVDKSRWQQGNVFSCSVMHEALHNHYTQKSLSLSPGKSGSETPGTSESATPESGGGEVQLVESGG
GLVQPGGSLRLSCAASGFNISSYYIHWVRQAPGKGLEWVASIYSSYGYTSYADSVKGRFTISADTSKNTAYLQMNSLRAEDTAVYYCA
RTVRGSKKPYFSGWAMDYWGQGTLVTVSSGGGGSDIQMTQSPSSLSASVGDRVTITCRASQSVSSAVAWYQQKPGKAPKLLIYSASSL
YSGVPSRFSGSRSGTDFTLTISSLQPEDFATYYCQQYSWGPFTFGQGTKVEIK (SEQ ID NO: 1004)
CM0112 Knob (scFv-Fc-Dia)
MNLLLILTFVAAAVAEFDIQMTQSPSSLSASVGDRVTITCRASQSVSSAVAWYQQKPGKAPKLLIYSASSLYSGVPSRFSGSRSGTDF
TLTISSLQPEDFATYYCQQGVYLFTFGQGTKVEIKGTTAASGSSGGSSSGAEVQLVESGGGLVQPGGSLRLSCAASGFNIGSSSIHWV
RQAPGKGLEWVASIYSAFASTSYADSVKGRFTISADTSKNTAYLQMNSLRAEDTAVYYCARYHFPFGFALDYWGQGTLVTVSSLEDKT
HTKVEPKTSDKTHTCPPCPAPELLGGPSVFLFPPKPKDTLMISRTPEVTCVVVDVSHEDPEVKFNWYVDGVEVHNAKTKPREEQYNST
YRVVSVLTVLHQDWLNGKEYKCKVSNKALPAPIEKTISKAKGQPREPMVFDLPPSREEMTKNQVSLWCMVKGFYPSDIAVEWESNGQP
ENNYKTTPPVLDSDGSFFLYSKLTVDKSRWQQGNVFSCSVMHEALHNHYTQKSLSLSPGKSGSETPGTSESATPESGGGEVQLVESGG
GLVQPGGSLRLSCAASGFNISYSSIHWVRQAPGKGLEWVAYISSYYGYTYYADSVKGRFTISADTSKNTAYLQMNSLRAEDTAVYYCA
RAHYFPWAGAMDYWGQGTLVTVSSGGGGSDIQMTQSPSSLSASVGDRVTITCRASQSVSSAVAWYQQKPGKAPKLLIYSASSLYSGVP
SRFSGSRSGTDFTLTISSLQPEDFATYYCQQYYWPITFGQGTKVEIK (SEQ ID NO: 1005)
CM0110 Hole (scFv-Fc-scFv)
MNLLLILTFVAAAVAEFDIQMTQSPSSLSASVGDRVTITCRASQSVSSAVAWYQQKPGKAPKLLIYSASSLYSGVPSRFSGSRSGTDF
TLTISSLQPEDFATYYCQQGVYLFTFGQGTKVEIKGTTAASGSSGGSSSGAEVQLVESGGGLVQPGGSLRLSCAASGFNIGSSSIHWV
RQAPGKGLEWVASIYSAFASTSYADSVKGRFTISADTSKNTAYLQMNSLRAEDTAVYYCARYHFPFGFALDYWGQGTLVTVSSLEDKT
HTKVEPKSSDKTHNCPPCPAPELLGGPSVFLFPPKPKDTLMISRTPEVTCVVVDVSHEDPEVKFNWYVDGVEVHNAKTKPREEQYNST
YRVVSVLTVLHQDWLNGKEYKCKVSNKALPAPIEKTISKAKGQPREPQVYTLPPIRELMTSNQVSLSCAVKGFYPSDIAVEWESNGQP
ENNYKTTPPVLDSDGSFFLVSKLTVDKSRWQQGNVFSCSVMHEALHNHYTQKSLSLSPGKSGSETPGTSESATPESGGGDIQMTQSPS
SLSASVGDRVTITCRASQSVSSAVAWYQQKPGKAPKLLIYSASSLYSGVPSRFSGSRSGTDFTLTISSLQPEDFATYYCQQYYWPITF
GQGTKVEIKGTTAASGSSGGSSSGAEVQLVESGGGLVQPGGSLRLSCAASGFNISSYYIHWVRQAPGKGLEWVASIYSSYGYTSYADS
VKGRFTISADTSKNTAYLQMNSLRAEDTAVYYCARTVRGSKKPYFSGWAMDYWGQGTLVTVSS (SEQ ID NO: 1006)
CM0110 Knob (scFv-Fc-scFv)
MNLLLILTFVAAAVAEFDIQMTQSPSSLSASVGDRVTITCRASQSVSSAVAWYQQKPGKAPKLLIYSASSLYSGVPSRFSGSRSGTDF
TLTISSLQPEDFATYYCQQGVYLFTFGQGTKVEIKGTTAASGSSGGSSSGAEVQLVESGGGLVQPGGSLRLSCAASGFNIGSSSIHWV
RQAPGKGLEWVASIYSAFASTSYADSVKGRFTISADTSKNTAYLQMNSLRAEDTAVYYCARYHFPFGFALDYWGQGTLVTVSSLEDKT
HTKVEPKTSDKTHTCPPCPAPELLGGPSVFLFPPKPKDTLMISRTPEVTCVVVDVSHEDPEVKFNWYVDGVEVHNAKTKPREEQYNST
YRVVSVLTVLHQDWLNGKEYKCKVSNKALPAPIEKTISKAKGQPREPMVFDLPPSREEMTKNQVSLWCMVKGFYPSDIAVEWESNGQP
ENNYKTTPPVLDSDGSFFLYSKLTVDKSRWQQGNVFSCSVMHEALHNHYTQKSLSLSPGKSGSETPGTSESATPESGGGDIQMTQSPS
SLSASVGDRVTITCRASQSVSSAVAWYQQKPGKAPKLLIYSASSLYSGVPSRFSGSRSGTDFTLTISSLQPEDFATYYCQQYSWGPFT
FGQGTKVEIKGTTAASGSSGGSSSGAEVQLVESGGGLVQPGGSLRLSCAASGFNISYSSIHWVRQAPGKGLEWVAYISSYYGYTYYAD
SVKGRFTISADTSKNTAYLQMNSLRAEDTAVYYCARAHYFPWAGAMDYWGQGTLVTVSS (SEQ ID NO: 1007)
CT001 CM0299 CM0300 CM0301 ANT1 LC
MNLLLILTFVAAAVADIQMTQSPSSLSASVGDRVTITCRASQSVSSAVAWYQQKPGKAPKLLIYSASSLYSGVPSRFSGSRSGTDFTL
TISSLQPEDFATYYCQQGVYLFTFGQGTKVEIKRTVAAPSVFIFPPSDEQLKSGTASVVCLLNNFYPREAKVQWKVDNALQSGNSQES
VTEQDSKDSTYSLSSTLTLSKADYEKHKVYACEVTHQGLSSPVTKSFNRGEC (SEQ ID NO: 1008)
CT001 Hole (bsIgG-dia)
MNLLLILTFVAAAVAEVQLVESGGGLVQPGGSLRLSCAASGFNIHSSSIHWVRQAPGKGLEWVAATYSSFGSITYADSVKGRFTISAD
TSKNTAYLQMNSLRAEDTAVYYCARYHHPFGYALDYWGQGTLVTVSSASTKGPSVFPLAPSSKSTSGGTAALGCLVKDYFPEPVTVSW
NSGALTSGVHTFPAVLQSSGLYSLSSVVTVPSSSLGTQTYICNVNHKPSNTKVDKKVEPKSCDKTHTCPPCPAPELLGGPSVFLFPPK
PKDTLMISRTPEVTCVVVDVSHEDPEVKFNWYVDGVEVHNAKTKPREEQYNSTYRVVSVLTVLHQDWLNGKEYKCKVSNKALPAPIEK
TISKAKGQPREPQVYTLPPIRELMTSNQVSLSCAVKGFYPSDIAVEWESNGQPENNYKTTPPVLDSDGSFFLVSKLTVDKSRWQQGNV
FSCSVMHEALHNHYTQKSLSLSPGKSGSETPGTSESATPESGGGEVQLVESGGGLVQPGGSLRLSCAASGFNISSYYIHWVRQAPGKG
LEWVASIYSSYGYTSYADSVKGRFTISADTSKNTAYLQMNSLRAEDTAVYYCARTVRGSKKPYFSGWAMDYWGQGTLVTVSSGGGGSD
IQMTQSPSSLSASVGDRVTITCRASQSVSSAVAWYQQKPGKAPKLLIYSASSLYSGVPSRFSGSRSGTDFTLTISSLQPEDFATYYCQ
QYSWGPFTFGQGTKVEIK (SEQ ID NO: 1009)
CT001 Knob (bsIgG-dia)
MNLLLILTFVAAAVAEVQLVESGGGLVQPGGSLRLSCAASGFNIHSSSIHWVRQAPGKGLEWVAATYSSFGSITYADSVKGRFTISAD
TSKNTAYLQMNSLRAEDTAVYYCARYHHPFGYALDYWGQGTLVTVSSASTKGPSVFPLAPSSKSTSGGTAALGCLVKDYFPEPVTVSW
NSGALTSGVHTFPAVLQSSGLYSLSSVVTVPSSSLGTQTYICNVNHKPSNTKVDKKVEPKSCDKTHTCPPCPAPELLGGPSVFLFPPK
PKDTLMISRTPEVTCVVVDVSHEDPEVKFNWYVDGVEVHNAKTKPREEQYNSTYRVVSVLTVLHQDWLNGKEYKCKVSNKALPAPIEK
TISKAKGQPREPMVFDLPPSREEMTKNQVSLWCMVKGFYPSDIAVEWESNGQPENNYKTTPPVLDSDGSFFLYSKLTVDKSRWQQGNV
FSCSVMHEALHNHYTQKSLSLSPGKSGSETPGTSESATPESGGGEVQLVESGGGLVQPGGSLRLSCAASGFNISYSSIHWVRQAPGKG
LEWVAYISSYYGYTYYADSVKGRFTISADTSKNTAYLQMNSLRAEDTAVYYCARAHYFPWAGAMDYWGQGTLVTVSSGGGGSDIQMTQ
SPSSLSASVGDRVTITCRASQSVSSAVAWYQQKPGKAPKLLIYSASSLYSGVPSRFSGSRSGTDFTLTISSLQPEDFATYYCQQYYWP
ITFGQGTKVEIK (SEQ ID NO: 1010)
CM0299 Hc (IgG-Dia)
MNLLLILTFVAAAVAEVQLVESGGGLVQPGGSLRLSCAASGFNIHSSSIHWVRQAPGKGLEWVAATYSSFGSITYADSVKGRFTISAD
TSKNTAYLQMNSLRAEDTAVYYCARYHHPFGYALDYWGQGTLVTVSSASTKGPSVFPLAPSSKSTSGGTAALGCLVKDYFPEPVTVSW
NSGALTSGVHTFPAVLQSSGLYSLSSVVTVPSSSLGTQTYICNVNHKPSNTKVDKKVEPKSCDKTHTCPPCPAPELLGGPSVFLFPPK
PKDTLMISRTPEVTCVVVDVSHEDPEVKFNWYVDGVEVHNAKTKPREEQYNSTYRVVSVLTVLHQDWLNGKEYKCKVSNKALPAPIEK
TISKAKGQPREPQVYTLPPSREEMTKNQVSLTCLVKGFYPSDIAVEWESNGQPENNYKTTPPVLDSDGSFFLYSKLTVDKSRWQQGNV
FSCSVMHEALHNHYTQKSLSLSPGKSGSETPGTSESATPESGGGEVQLVESGGGLVQPGGSLRLSCAASGFNISYSSIHWVRQAPGKG
LEWVAYISSYYGYTYYADSVKGRFTISADTSKNTAYLQMNSLRAEDTAVYYCARAHYFPWAGAMDYWGQGTLVTVSSGGGGSDIQMTQ
SPSSLSASVGDRVTITCRASQSVSSAVAWYQQKPGKAPKLLIYSASSLYSGVPSRFSGSRSGTDFTLTISSLQPEDFATYYCQQYSWG
PFTFGQGTKVEIK (SEQ ID NO: 1011)
CM0300 Hc (IgG-scFv)
MNLLLILTFVAAAVAEVQLVESGGGLVQPGGSLRLSCAASGFNIHSSSIHWVRQAPGKGLEWVAATYSSFGSITYADSVKGRFTISAD
TSKNTAYLQMNSLRAEDTAVYYCARYHHPFGYALDYWGQGTLVTVSSASTKGPSVFPLAPSSKSTSGGTAALGCLVKDYFPEPVTVSW
NSGALTSGVHTFPAVLQSSGLYSLSSVVTVPSSSLGTQTYICNVNHKPSNTKVDKKVEPKSCDKTHTCPPCPAPELLGGPSVFLFPPK
PKDTLMISRTPEVTCVVVDVSHEDPEVKFNWYVDGVEVHNAKTKPREEQYNSTYRVVSVLTVLHQDWLNGKEYKCKVSNKALPAPIEK
TISKAKGQPREPQVYTLPPSREEMTKNQVSLTCLVKGFYPSDIAVEWESNGQPENNYKTTPPVLDSDGSFFLYSKLTVDKSRWQQGNV
FSCSVMHEALHNHYTQKSLSLSPGKSGSETPGTSESATPESGGGDIQMTQSPSSLSASVGDRVTITCRASQSVSSAVAWYQQKPGKAP
KLLIYSASSLYSGVPSRFSGSRSGTDFTLTISSLQPEDFATYYCQQYSWGPFTFGQGTKVEIKGTTAASGSSGGSSSGAEVQLVESGG
GLVQPGGSLRLSCAASGFNISYSSIHWVRQAPGKGLEWVAYISSYYGYTYYADSVKGRFTISADTSKNTAYLQMNSLRAEDTAVYYCA
RAHYFPWAGAMDYWGQGTLVTVSS (SEQ ID NO: 1012)
CM0301 Hc (IgG-scFv)
MNLLLILTFVAAAVAEVQLVESGGGLVQPGGSLRLSCAASGFNIHSSSIHWVRQAPGKGLEWVAATYSSFGSITYADSVKGRFTISAD
TSKNTAYLQMNSLRAEDTAVYYCARYHHPFGYALDYWGQGTLVTVSSASTKGPSVFPLAPSSKSTSGGTAALGCLVKDYFPEPVTVSW
NSGALTSGVHTFPAVLQSSGLYSLSSVVTVPSSSLGTQTYICNVNHKPSNTKVDKKVEPKSCDKTHTCPPCPAPELLGGPSVFLFPPK
PKDTLMISRTPEVTCVVVDVSHEDPEVKFNWYVDGVEVHNAKTKPREEQYNSTYRVVSVLTVLHQDWLNGKEYKCKVSNKALPAPIEK
TISKAKGQPREPQVYTLPPSREEMTKNQVSLTCLVKGFYPSDIAVEWESNGQPENNYKTTPPVLDSDGSFFLYSKLTVDKSRWQQGNV
FSCSVMHEALHNHYTQKSLSLSPGKSGSETPGTSESATPESGGGDIQMTQSPSSLSASVGDRVTITCRASQSVSSAVAWYQQKPGKAP
KLLIYSASSLYSGVPSRFSGSRSGTDFTLTISSLQPEDFATYYCQQYYWPITFGQGTKVEIKGTTAASGSSGGSSSGAEVQLVESGGG
LVQPGGSLRLSCAASGFNISSYYIHWVRQAPGKGLEWVASIYSSYGYTSYADSVKGRFTISADTSKNTAYLQMNSLRAEDTAVYYCAR
TVRGSKKPYFSGWAMDYWGQGTLVTVSS (SEQ ID NO: 1013)
ANT1 Hole (Dia-Fc-Fab)
MNLLLILTFVAAAVAEFEVQLVESGGGLVQPGGSLRLSCAASGFNISSYYIHWVRQAPGKGLEWVASIYSSYGYTSYADSVKGRFTIS
ADTSKNTAYLQMNSLRAEDTAVYYCARTVRGSKKPYFSGWAMDYWGQGTLVTVSSGGGGSDIQMTQSPSSLSASVGDRVTITCRASQS
VSSAVAWYQQKPGKAPKLLIYSASSLYSGVPSRFSGSRSGTDFTLTISSLQPEDFATYYCQQYYFLITFGQGTKVEIKLEDKTHTKVE
PKSSDKTHNCPPCPAPELLGGPSVFLFPPKPKDTLMISRTPEVTCVVVDVSHEDPEVKFNWYVDGVEVHNAKTKPREEQYNSTYRVVS
VLTVLHQDWLNGKEYKCKVSNKALPAPIEKTISKAKGQPREPQVYTLPPIRELMTSNQVSLSCAVKGFYPSDIAVEWESNGQPENNYK
TTPPVLDSDGSFFLVSKLTVDKSRWQQGNVFSCSVMHEALHNHYTQKSLSLSPGKSGSETPGTSESATPESGGGEVQLVESGGGLVQP
GGSLRLSCAASGFNIHSSSIHWVRQAPGKGLEWVAATYSSFGSITYADSVKGRFTISADTSKNTAYLQMNSLRAEDTAVYYCARYHHP
FGYALDYWGQGTLVTVSSASTKGPSVFPLAPSSKSTSGGTAALGCLVKDYFPEPVTVSWNSGALTSGVHTFPAVLQSSGLYSLSSVVT
VPSSSLGTQTYICNVNHKPSNTKVDKKVEPKSCDKTHT (SEQ ID NO: 1014)
ANT1 Knob (Dia-Fc-Fab)
MNLLLILTFVAAAVAEFEVQLVESGGGLVQPGGSLRLSCAASGFNISYSSIHWVRQAPGKGLEWVASISPYYGYTYYADSVKGRFTIS
ADTSKNTAYLQMNSLRAEDTAVYYCARSSYFPWESAMDYWGQGTLVTVSSGGGGSDIQMTQSPSSLSASVGDRVTITCRASQSVSSAV
AWYQQKPGKAPKLLIYSASSLYSGVPSRFSGSRSGTDFTLTISSLQPEDFATYYCQQYYWPITFGQGTKVEIKLEDKTHTKVEPKTSD
KTHTCPPCPAPELLGGPSVFLFPPKPKDTLMISRTPEVTCVVVDVSHEDPEVKFNWYVDGVEVHNAKTKPREEQYNSTYRVVSVLTVL
HQDWLNGKEYKCKVSNKALPAPIEKTISKAKGQPREPMVFDLPPSREEMTKNQVSLWCMVKGFYPSDIAVEWESNGQPENNYKTTPPV
LDSDGSFFLYSKLTVDKSRWQQGNVFSCSVMHEALHNHYTQKSLSLSPGKSGSETPGTSESATPESGGGEVQLVESGGGLVQPGGSLR
LSCAASGFNIHSSSIHWVRQAPGKGLEWVAATYSSFGSITYADSVKGRFTISADTSKNTAYLQMNSLRAEDTAVYYCARYHHPFGYAL
DYWGQGTLVTVSSASTKGPSVFPLAPSSKSTSGGTAALGCLVKDYFPEPVTVSWNSGALTSGVHTFPAVLQSSGLYSLSSVVTVPSSS
LGTQTYICNVNHKPSNTKVDKKVEPKSCDKTHT (SEQ ID NO: 1015)
Fab-Dia Hc (Fab-Dia)
MNLLLILTFVAAAVAEVQLVESGGGLVQPGGSLRLSCAASGFNIHSSSIHWVRQAPGKGLEWVAATYSSFGSITYADSVKGRFTISAD
TSKNTAYLQMNSLRAEDTAVYYCARYHHPFGYALDYWGQGTLVTVSSASTKGPSVFPLAPSSKSTSGGTAALGCLVKDYFPEPVTVSW
NSGALTSGVHTFPAVLQSSGLYSLSSVVTVPSSSLGTQTYICNVNHKPSNTKVDKKVEPKSCDKTHTGGSGGEVQLVESGGGLVQPGG
SLRLSCAASGFTISYSSIHWVRQAPGKGLEWVASISPYYGYTYYADSVKGRFTISADTSKNTAYLQMNSLRAEDTAVYYCARSSYFPW
FSAMDYWGQGTLVTVSSGGGGSDIQMTQSPSSLSASVGDRVTITCRASQSVSSAVAWYQQKPGKAPKLLIYSASSLYSGVPSRFSGSR
SGTDFTLTISSLQPEDFATYYCQQYYWPITFGQGTKVEIK (SEQ ID NO: 1016)
Fab-Dia LC (Fab-Dia)
MNLLLILTFVAAAVADIQMTQSPSSLSASVGDRVTITCRASQSVSSAVAWYQQKPGKAPKLLIYSASSLYSGVPSRFSGSRSGTDFTL
TISSLQPEDFATYYCQQGVYLFTFGQGTKVEIKRTVAAPSVFIFPPSDEQLKSGTASVVCLLNNFYPREAKVQWKVDNALQSGNSQES
VTEQDSKDSTYSLSSTLTLSKADYEKHKVYACEVTHQGLSSPVTKSFNRGECGGGGSEVQLVESGGGLVQPGGSLRLSCAASGFTISS
YYIHWVRQAPGKGLEWVASIYSSYGYTSYADSVKGRFTISADTSKNTAYLQMNSLRAEDTAVYYCARTVRGSKKPYFSGWAMDYWGQG
TLVTVSSGGGGSDIQMTQSPSSLSASVGDRVTITCRASQSVSSAVAWYQQKPGKAPKLLIYSASSLYSGVPSRFSGSRSGTDFTLTIS
SLQPEDFATYYCQQYYFLITFGQGTKVEIK (SEQ ID NO: 1017)
CH3 (Dia-CH3-Dia)
MNLLLILTFVAAAVAEFEVQLVESGGGLVQPGGSLRLSCAASGFNIGSSSIHWVRQAPGKGLEWVASIYSAFASTSYADSVKGRFTIS
ADTSKNTAYLQMNSLRAEDTAVYYCARYHFPFGFALDYWGQGTLVTVSSGGGGSDIQMTQSPSSLSASVGDRVTITCRASQSVSSAVA
WYQQKPGKAPKLLIYSASSLYSGVPSRFSGSRSGTDFTLTISSLQPEDFATYYCQQGVYLFTFGQGTKVEIKDKTHTKVEPKTSDKTH
TCPPCPGQPREPQVYTLPPSREEMTKNQVSLTCLVKGFYPSDIAVEWESNGQPENNYKTTPPVLDSDGSFFLYSKLTVDKSRWQQGNV
FSCSVMHEALHNHYTQKSLSLSPGKGTTAASGSSGGSSSGAGRTEVQLVESGGGLVQPGGSLRLSCAASGFNISYSSIHWVRQAPGKG
LEWVAYISSYYGYTYYADSVKGRFTISADTSKNTAYLQMNSLRAEDTAVYYCARAHYFPWAGAMDYWGQGTLVTVSSGGGGSDIQMTQ
SPSSLSASVGDRVTITCRASQSVSSAVAWYQQKPGKAPKLLIYSASSLYSGVPSRFSGSRSGTDFTLTISSLQPEDFATYYCQQYSWG
PFTFGQGTKVEIK (SEQ ID NO: 1018)
CM0156
EVQLVESGGGLVQPGGSLRLSCAASGFNISYSYMHWVRQAPGKGLEWVASISPYYSYTSYADSVKGRFTISADTSKNTAYLQMNSLRA
EDTAVYYCARPSAWSHYYPSSSSSAFDYWGQGTLVTVSSGGGGSDIQMTQSPSSLSASVGDRVTITCRASQSVSSAVAWYQQKPGKAP
KLLIYSASSLYSGVPSRFSGSRSGTDFTLTISSLQPEDFATYYCQQSSYSLITFGQGTKVEIKLEDKTHTKVEPKSSDKTHTCPPCPA
PELLGGPSVFLFPPKPKDTLMISRTPEVTCVVVDVSHEDPEVKFNWYVDGVEVHNAKTKPREEQYNSTYRVVSVLTVLHQDWLNGKEY
KCKVSNKALPAPIEKTISKAKGQPREPQVYTLPPSREEMTKNQVSLTCLVKGFYPSDIAVEWESNGQPENNYKTTPPVLDSDGSFFLY
SKLTVDKSRWQQGNVFSCSVMHEALHNHYTQKSLSLSPGKSGSETPGTSESATPESGGGEVQLVESGGGLVQPGGSLRLSCAASGFNI
SYSYMHWVRQAPGKGLEWVASISPYYSYTSYADSVKGRFTISADTSKNTAYLQMNSLRAEDTAVYYCARPSAWSHYYPSSSSSAFDYW
GQGTLVTVSSGGGGSDIQMTQSPSSLSASVGDRVTITCRASQSVSSAVAWYQQKPGKAPKLLIYSASSLYSGVPSRFSGSRSGTDFTL
TISSLQPEDFATYYCQQSSYSLITFGQGTKVEIK (SEQ ID NO: 1019)

TABLE 14
Comparison of expression titers and monodispersity of FZD agonists
following Protein A purification. See corresponding FIG. 21.

| | | N-term | C-term | Expression | % | Monomer |
|---|---|---|---|---|---|---|
| Molecule | Format | Paratope | Paratope | Titer mg/l | Monomer | Yield (mg/l) |
| CM0042 | Dia - Fc- Dia | 5019 | 2539 | 8 ± 4 | 43 | 3 |
| CM0011 | Dia - Fc- Dia | 5019 | 2539/2542 | 12 ± 3 | 81 ± 5 | 10 |
| CM0126 | Dia - Fc- Dia | 5016 | 2539/2542 | 8 ± 0.7 | ND | ND |
| CM0107 | Dia - Fc - scFv | 5019 | 2539 | 90 | 87 | 80 |
| CM0108 | Dia - Fc - scFv | 5019 | 2542 | 47 | 89 | 40 |
| CM0109 | Dia - Fc - scFv | 5019 | 2539/2542 | 79 | 86 | 70 |
| CT003 | Dia - Fc - scFv | 2539/2542 | 5016 | 47 | 67 | 30 |
| CM0112 | scFv - Fc - Dia | 5019 | 2539/2542 | 15 | 79 | 10 |
| CM0110 | scFv - Fc - scFv | 5019 | 2539/2542 | 82 | 81 | 70 |
| CT001 | bslgG-dia | 5016 | 2539/2542 | 47 ± 21 | 44 ± 11 | 30 |
| CM0299 | lgG-dia | 5016 | 2539 | 20 ± 8 | ND | ND |
| CM0300 | lgG - scFv | 5016 | 2539 | 134 ± 38 | 66 ± 7 | 100 |
| CM0301 | lgG - scFv | 5016 | 2542 | 134 ± 27 | 71 ± 8 | 90 |
| ANT1 | Dia-Fc-Fab | 5016 | 2539/2542 | 294 ± 75 | 53 ± 9 | 150 |
| CH3 | Dia-CH3-Dia | 5019 | 2539 | <1 | ND | ND |
| Fab-Dia | FAb-Dia | 5016 | 2540/2542 | 1 | ND | ND |

TABLE 15
Functional comparison of FZD agonists. Concentration-response curves of each
FZD agonist were generated using the TOPFLASH assay. FIG. 20 shows representative
traces of the A) Diabody-Fc-Diabody and B) Diabody-Fc-Fab format overlaid with
Wnt3a for comparison. Calculated EC50 and maximum efficacy relative to recombinant
Wnt3a control were derived and are presented as the average ± SD.

| | | | | | Maximal |
|---|---|---|---|---|---|
| | | | | | Signal |
| | | N-term | C-term | EC₅₀ | (% Wnt3a |
| Name | Format | Paratope | Paratope | (nM) | maxima) |
| Wnt3a | Recombinant Protein | NA | NA | 6 ± 3 | 100 |
| CM0042 | Dia - Fc - Dia | 5019 | 2539 | 0.9 ± 0.8 | 33 ± 22 |
| CM0011 | Dia - Fc - Dia | 5019 | 2539/2542 | 0.3 ± 0.1 | 63 ± 10 |
| CM0126 | Dia - Fc - Dia | 5016 | 2539/2542 | 0.3 ± 0.2 | 52 ± 1 |
| CM0107 | Dia-Fc-scFv | 5019 | 2539 | ND | ND |
| CM0108 | Dia-Fc-scFv | 5019 | 2542 | ND | ND |
| CM0109 | Dia-Fc-scFv | 5019 | 2539/2542 | ND | ND |
| CT003 | Dia-Fc-scFv | 2539/2542 | 5016 | 0.4 ± 0.1 | 42 ± 16 |
| CM0112 | scFv-Fc-Dia | 5019 | 2539/2542 | ND | ND |
| CM0110 | scFv-Fc-scFv | 5019 | 2539/2542 | ND | ND |
| CT001 | bslgG-dia | 5016 | 2539/2542 | 0.3 ± 0.1 | 57 ± 17 |
| CM0299 | lgG-dia | 5016 | 2539 | 0.1 ± 0.1 | 14 ± 5 |
| CM0300 | lgG-scFv | 5016 | 2539 | 0.3 ± 0.2 | 5 ± 2 |
| CM0301 | lgG-scFv | 5016 | 2542 | 0.2 ± 0.2 | 1 ± 1 |
| ANT1 | Dia-Fc-Fab | 5016 | 2539/2542 | 0.7 ± 0.5 | 50 ± 18 |
| CH3 | Dia-CH3-Dia | 5019 | 2539 | ND | 22 ± 10 |
| FAb-Dia | Fab-Dia | 5016 | 2540/2542 | 0.4 ± 0.2 | 42 ± 16 |

TABLE 16
FZD2-LRP6 CM0072

| Knob | MNLLLILTFVAAAVAEFEVQLVESGGGLVQPGGSLRLSCAASGFNIYYSSIHWVRQAPGKGLEWVASIYPYYGYTYYADSVKGR |
|---|---|
| construct | FTISADTSKNTAYLQMNSLRAEDTAVYYCARYYHYGLDYWGQGTLVTVSSGGGGSDIQMTQSPSSLSASVGDRVTITCRASQS |
| | VSSAVAWYQQKPGKAPKLLIYSASSLYSGVPSRFSGSRSGTDFTLTISSLQPEDFATYYCQQSYWHSYLITFGQGTKVEIKLEDKT |
| | HTKVEPKTSDKTHTCPPCPAPELLGGPSVFLFPPKPKDTLMISRTPEVTCVVVDVSHEDPEVKFNWYVDGVEVHNAKTKPREEQ |
| | YNSTYRVVSVLTVLHQDWLNGKEYKCKVSNKALPAPIEKTISKAKGQPREPMVFDLPPSREEMTKNQVSLWCMVKGFYPSDI |
| | AVEWESNGQPENNYKTTPPVLDSDGSFFLYSKLTVDKSRWQQGNVFSCSVMHEALHNHYTQKSLSLSPGKSGSETPGTSESAT |
| | PESGGGEVQLVESGGGLVQPGGSLRLSCAASGFNISYSSIHWVRQAPGKGLEWVAYISSYYGYTYYADSVKGRFTISADTSKNT |
| | AYLQMNSLRAEDTAVYYCARAHYFPWAGAMDYWGQGTLVTVSSGGGGSDIQMTQSPSSLSASVGDRVTITCRASQSVSSAVA |
| | WYQQKPGKAPKLLIYSASSLYSGVPSRFSGSRSGTDFTLTISSLQPEDFATYYCQQYYWPITFGQGTKVEIK (SEQ ID NO: 1020) |
| Hole | MNLLLILTFVAAAVAEFEVQLVESGGGLVQPGGSLRLSCAASGFNIYYSSIHWVRQAPGKGLEWVASIYPYYGYTYYADSVKGR |
| construct | FTISADTSKNTAYLQMNSLRAEDTAVYYCARYYHYGLDYWGQGTLVTVSSGGGGSDIQMTQSPSSLSASVGDRVTITCRASQS |
| | VSSAVAWYQQKPGKAPKLLIYSASSLYSGVPSRFSGSRSGTDFTLTISSLQPEDFATYYCQQSYWHSYLITFGQGTKVEIKLEDKT |
| | HTKVEPKSSDKTHNCPPCPAPELLGGPSVFLFPPKPKDTLMISRTPEVTCVVVDVSHEDPEVKFNWYVDGVEVHNAKTKPREEQ |
| | YNSTYRVVSVLTVLHQDWLNGKEYKCKVSNKALPAPIEKTISKAKGQPREPQVYTLPPIRELMTSNQVSLSCAVKGFYPSDIAV |
| | EWESNGQPENNYKTTPPVLDSDGSFFLVSKLTVDKSRWQQGNVFSCSVMHEALHNHYTQKSLSLSPGKSGSETPGTSESATPES |
| | GGGEVQLVESGGGLVQPGGSLRLSCAASGFNISSYYIHWVRQAPGKGLEWVASIYSSYGYTSYADSVKGRFTISADTSKNTAYL |
| | QMNSLRAEDTAVYYCARTVRGSKKPYFSGWAMDYWGQGTLVTVSSGGGGSDIQMTQSPSSLSASVGDRVTITCRASQSVSSA |
| | VAWYQQKPGKAPKLLIYSASSLYSGVPSRFSGSRSGTDFTLTISSLQPEDFATYYCQQYSWGPFTFGQGTKVEIK (SEQ ID NO: |
| | 1021) |

FZD5-LRP6 CM0024

| | |
|---|---|
| Knob | MNLLLILTFVAAAVAEFEVQLVESGGGLVQPGGSLRLSCAASGFNISYSSIHWVRQAPGKGLEWVASIYPSYSSTYYADSVKGR |
| construct | FTISADTSKNTAYLQMNSLRAEDTAVYYCARYYAMDYWGQGTLVTVSSGGGGSDIQMTQSPSSLSASVGDRVTITCRASQSVS |
| | SAVAWYQQKPGKAPKLLIYSASSLYSGVPSRFSGSRSGTDFTLTISSLQPEDFATYYCQQAFYYPITFGQGTKVEIKLEDKTHTKV |
| | EPKTSDKTHTCPPCPAPELLGGPSVFLFPPKPKDTLMISRTPEVTCVVVDVSHEDPEVKFNWYVDGVEVHNAKTKPREEQYNST |
| | YRVVSVLTVLHQDWLNGKEYKCKVSNKALPAPIEKTISKAKGQPREPMVFDLPPSREEMTKNQVSLWCMVKGFYPSDIAVEW |
| | ESNGQPENNYKTTPPVLDSDGSFFLYSKLTVDKSRWQQGNVFSCSVMHEALHNHYTQKSLSLSPGKSGSETPGTSESATPESGG |
| | GEVQLVESGGGLVQPGGSLRLSCAASGFNISYSSIHWVRQAPGKGLEWVAYISSYYGYTYYADSVKGRFTISADTSKNTAYLQM |
| | NSLRAEDTAVYYCARAHYFPWAGAMDYWGQGTLVTVSSGGGGSDIQMTQSPSSLSASVGDRVTITCRASQSVSSAVAWYQQKP |
| | GKAPKLLIYSASSLYSGVPSRFSGSRSGTDFTLTISSLQPEDFATYYCQQYYWPITFGQGTKVEIK (SEQ ID NO: 1022) |
| Hole | MNLLLILTFVAAAVAEFEVQLVESGGGLVQPGGSLRLSCAASGFNISYSSIHWVRQAPGKGLEWVASIYPSYSSTYYADSVKGR |
| construct | FTISADTSKNTAYLQMNSLRAEDTAVYYCARYYAMDYWGQGTLVTVSSGGGGSDIQMTQSPSSLSASVGDRVTITCRASQSVS |
| | SAVAWYQQKPGKAPKLLIYSASSLYSGVPSRFSGSRSGTDFTLTISSLQPEDFATYYCQQAFYYPITFGQGTKVEIKLEDKTHTKV |
| | EPKSSDKTHNCPPCPAPELLGGPSVFLFPPKPKDTLMISRTPEVTCVVVDVSHEDPEVKFNWYVDGVEVHNAKTKPREEQYNST |
| | YRVVSVLTVLHQDWLNGKEYKCKVSNKALPAPIEKTISKAKGQPREPQVYTLPPIRELMTSNQVSLSCAVKGFYPSDIAVEWES |
| | NGQPENNYKTTPPVLDSDGSFFLVSKLTVDKSRWQQGNVFSCSVMHEALHNHYTQKSLSLSPGKSGSETPGTSESATPESGGG |
| | EVQLVESGGGLVQPGGSLRLSCAASGFNISSYYIHWVRQAPGKGLEWVASIYSSYGYTSYADSVKGRFTISADTSKNTAYLQMN |
| | SLRAEDTAVYYCARTVRGSKKPYFSGWAMDYWGQGTLVTVSSGGGGSDIQMTQSPSSLSASVGDRVTITCRASQSVSSAVAWYQ |
| | QKPGKAPKLLIYSASSLYSGVPSRFSGSRSGTDFTLTISSLQPEDFATYYCQQYSWGPFTFGQGTKVEIK (SEQ ID NO: 1023) |

FZD7-LRP6 CM0172

| | |
|---|---|
| Knob | MNLLLILTFVAAAVAEFEVQLVESGGGLVQPGGSLRLSCAASGFNISSSSMHWVRQAPGKGLEWVASIYSYYGSTYYADSVKG |
| construct | RFTISADTSKNTAYLQMNSLRAEDTAVYYCARWYGMDYWGQGTLVTVSSGGGGSDIQMTQSPSSLSASVGDRVTITCRASQS |
| | VSSAVAWYQQKPGKAPKLLIYSASSLYSGVPSRFSGSRSGTDFTLTISSLQPEDFATYYCQQPGSWYFPPITFGQGTKVEIKLEDK |
| | THTKVEPKTSDKTHTCPPCPAPELLGGPSVFLFPPKPKDTLMISRTPEVTCVVVDVSHEDPEVKFNWYVDGVEVHNAKTKPREE |
| | QYNSTYRVVSVLTVLHQDWLNGKEYKCKVSNKALPAPIEKTISKAKGQPREPMVFDLPPSREEMTKNQVSLWCMVKGFYPSD |
| | IAVEWESNGQPENNYKTTPPVLDSDGSFFLYSKLTVDKSRWQQGNVFSCSVMHEALHNHYTQKSLSLSPGKSGSETPGTSESA |
| | TPESGGGEVQLVESGGGLVQPGGSLRLSCAASGFNISYSSIHWVRQAPGKGLEWVAYISSYYGYTYYADSVKGRFTISADTSKN |
| | TAYLQMNSLRAEDTAVYYCARAHYFPWAGAMDYWGQGTLVTVSSGGGGSDIQMTQSPSSLSASVGDRVTITCRASQSVSSAVA |
| | WYQQKPGKAPKLLIYSASSLYSGVPSRFSGSRSGTDFTLTISSLQPEDFATYYCQQYYWPITFGQGTKVEIK (SEQ ID NO: 1024) |
| Hole | MNLLLILTFVAAAVAEFEVQLVESGGGLVQPGGSLRLSCAASGFNISSSSMHWVRQAPGKGLEWVASIYSYYGSTYYADSVKG |
| construct | RFTISADTSKNTAYLQMNSLRAEDTAVYYCARWYGMDYWGQGTLVTVSSGGGGSDIQMTQSPSSLSASVGDRVTITCRASQS |
| | VSSAVAWYQQKPGKAPKLLIYSASSLYSGVPSRFSGSRSGTDFTLTISSLQPEDFATYYCQQPGSWYFPPITFGQGTKVEIKLEDK |
| | THTKVEPKSSDKTHNCPPCPAPELLGGPSVFLFPPKPKDTLMISRTPEVTCVVVDVSHEDPEVKFNWYVDGVEVHNAKTKPRE |
| | EQYNSTYRVVSVLTVLHQDWLNGKEYKCKVSNKALPAPIEKTISKAKGQPREPQVYTLPPIRELMTSNQVSLSCAVKGFYPSDI |
| | AVEWESNGQPENNYKTTPPVLDSDGSFFLVSKLTVDKSRWQQGNVFSCSVMHEALHNHYTQKSLSLSPGKSGSETPGTSESAT |
| | PESGGGEVQLVESGGGLVQPGGSLRLSCAASGFNISSYYIHWVRQAPGKGLEWVASIYSSYGYTSYADSVKGRFTISADTSKNTA |
| | YLQMNSLRAEDTAVYYCARTVRGSKKPYFSGWAMDYWGQGTLVTVSSGGGGSDIQMTQSPSSLSASVGDRVTITCRASQSVSSA |
| | VAWYQQKPGKAPKLLIYSASSLYSGVPSRFSGSRSGTDFTLTISSLQPEDFATYYCQQYSWGPFTFGQGTKVEIK (SEQ ID NO: |
| | 1025) |

PanFZD-LRP6 CM0011

| | |
|---|---|
| Knob | MNLLLILTFVAAAVAEFEVQLVESGGGLVQPGGSLRLSCAASGFNIGSSSIHWVRQAPGKGLEWVASIYSAFASTSYADSVKGR |
| construct | FTISADTSKNTAYLQMNSLRAEDTAVYYCARYHFPFGFALDYWGQGTLVTVSSGGGGSDIQMTQSPSSLSASVGDRVTITCRA |
| | SQSVSSAVAWYQQKPGKAPKLLIYSASSLYSGVPSRFSGSRSGTDFTLTISSLQPEDFATYYCQQGVYLFTFGQGTKVEIKLEDKT |
| | HTKVEPKTSDKTHTCPPCPAPELLGGPSVFLFPPKPKDTLMISRTPEVTCVVVDVSHEDPEVKFNWYVDGVEVHNAKTKPREE |
| | QYNSTYRVVSVLTVLHQDWLNGKEYKCKVSNKALPAPIEKTISKAKGQPREPMVFDLPPSREEMTKNQVSLWCMVKGFYPSD |
| | IAVEWESNGQPENNYKTTPPVLDSDGSFFLYSKLTVDKSRWQQGNVFSCSVMHEALHNHYTQKSLSLSPGKSGSETPGTSESA |
| | TPESGGGEVQLVESGGGLVQPGGSLRLSCAASGFNISYSSIHWVRQAPGKGLEWVAYISSYYGYTYYADSVKGRFTISADTSKN |
| | TAYLQMNSLRAEDTAVYYCARAHYFPWAGAMDYWGQGTLVTVSSGGGGSDIQMTQSPSSLSASVGDRVTITCRASQSVSSAVA |
| | WYQQKPGKAPKLLIYSASSLYSGVPSRFSGSRSGTDFTLTISSLQPEDFATYYCQQYYWPITFGQGTKVEIK (SEQ ID NO: 1026) |
| Hole | MNLLLILTFVAAAVAEFEVQLVESGGGLVQPGGSLRLSCAASGFNIGSSSIHWVRQAPGKGLEWVASIYSAFASTSYADSVKGR |
| construct | FTISADTSKNTAYLQMNSLRAEDTAVYYCARYHFPFGFALDYWGQGTLVTVSSGGGGSDIQMTQSPSSLSASVGDRVTITCRA |
| | SQSVSSAVAWYQQKPGKAPKLLIYSASSLYSGVPSRFSGSRSGTDFTLTISSLQPEDFATYYCQQGVYLFTFGQGTKVEIKLEDKT |
| | HTKVEPKSSDKTHNCPPCPAPELLGGPSVFLFPPKPKDTLMISRTPEVTCVVVDVSHEDPEVKFNWYVDGVEVHNAKTKPREE |
| | QYNSTYRVVSVLTVLHQDWLNGKEYKCKVSNKALPAPIEKTISKAKGQPREPQVYTLPPIRELMTSNQVSLSCAVKGFYPSDIA |
| | VEWESNGQPENNYKTTPPVLDSDGSFFLVSKLTVDKSRWQQGNVFSCSVMHEALHNHYTQKSLSLSPGKSGSETPGTSESATP |
| | ESGGGEVQLVESGGGLVQPGGSLRLSCAASGFNISSYYIHWVRQAPGKGLEWVASIYSSYGYTSYADSVKGRFTISADTSKNTA |
| | YLQMNSLRAEDTAVYYCARTVRGSKKPYFSGWAMDYWGQGTLVTVSSGGGGSDIQMTQSPSSLSASVGDRVTITCRASQSVSSA |
| | VAWYQQKPGKAPKLLIYSASSLYSGVPSRFSGSRSGTDFTLTISSLQPEDFATYYCQQYSWGPFTFGQGTKVEIK (SEQ ID NO: |
| | 1027) |

FZD4-LRP6 CM0016

| | |
|---|---|
| Knob | MNLLLILTFVAAAVAEFEVQLVESGGGLVQPGGSLRLSCAASGFNISYYYIHWVRQAPGKGLEWVASIYPSSGYTYYADSVKGR |
| construct | FTISADTSKNTAYLQMNSLRAEDTAVYYCARSSFYWAMDYWGQGTLVTVSSGGGGSDIQMTQSPSSLSASVGDRVTITCRASQ |
| | SVSSAVAWYQQKPGKAPKLLIYSASSLYSGVPSRFSGSRSGTDFTLTISSLQPEDFATYYCQQSYAAYLFTFGQGTKVEIKLEDKT |
| | HTKVEPKSSDKTHNCPPCPAPELLGGPSVFLFPPKPKDTLMISRTPEVTCVVVDVSHEDPEVKFNWYVDGVEVHNAKTKPREE |
| | QYNSTYRVVSVLTVLHQDWLNGKEYKCKVSNKALPAPIEKTISKAKGQPREPQVYTLPPIRELMTSNQVSLSCAVKGFYPSDIA |
| | VEWESNGQPENNYKTTPPVLDSDGSFFLVSKLTVDKSRWQQGNVFSCSVMHEALHNHYTQKSLSLSPGKSGSETPGTSESATP |
| | ESGGGEVQLVESGGGLVQPGGSLRLSCAASGFNISSYYIHWVRQAPGKGLEWVASIYSSYGYTSYADSVKGRFTISADTSKNTA |
| | YLQMNSLRAEDTAVYYCARTVRGSKKPYFSGWAMDYWGQGTLVTVSSGGGGSDIQMTQSPSSLSASVGDRVTITCRASQSVSSA |
| | VAWYQQKPGKAPKLLIYSASSLYSGVPSRFSGSRSGTDFTLTISSLQPEDFATYYCQQYSWGPFTFGQGTKVEIK (SEQ ID NO: |
| | 1028) |
| Hole | MNLLLILTFVAAAVAEFEVQLVESGGGLVQPGGSLRLSCAASGFNISYYYIHWVRQAPGKGLEWVASIYPSSGYTYYADSVKGR |
| construct | FTISADTSKNTAYLQMNSLRAEDTAVYYCARSSFYWAMDYWGQGTLVTVSSGGGGSDIQMTQSPSSLSASVGDRVTITCRASQ |
| | SVSSAVAWYQQKPGKAPKLLIYSASSLYSGVPSRFSGSRSGTDFTLTISSLQPEDFATYYCQQSYAAYLFTFGQGTKVEIKLEDKT |
| | HTKVEPKTSDKTHTCPPCPAPELLGGPSVFLFPPKPKDTLMISRTPEVTCVVVDVSHEDPEVKFNWYVDGVEVHNAKTKPREE |
| | QYNSTYRVVSVLTVLHQDWLNGKEYKCKVSNKALPAPIEKTISKAKGQPREPMVFDLPPSREEMTKNQVSLWCMVKGFYPSD |
| | IAVEWESNGQPENNYKTTPPVLDSDGSFFLYSKLTVDKSRWQQGNVFSCSVMHEALHNHYTQKSLSLSPGKSGSETPGTSESA |
| | TPESGGGEVQLVESGGGLVQPGGSLRLSCAASGFNISYSSIHWVRQAPGKGLEWVAYISSYYGYTYYADSVKGRFTISADTSKN |
| | TAYLQMNSLRAEDTAVYYCARAHYFPWAGAMDYWGQGTLVTVSSGGGGSDIQMTQSPSSLSASVGDRVTITCRASQSVSSAVA |
| | WYQQKPGKAPKLLIYSASSLYSGVPSRFSGSRSGTDFTLTISSLQPEDFATYYCQQYYWPITFGQGTKVEIK (SEQ ID NO: 1029) |

The application's sequence listing, which the Patent Office published only in electronic form, follows.

SEQUENCE LISTING (1029 sequences)

SEQ ID NO: 1 - protein, 5 aa, Artificial Sequence
  Description of Artificial Sequence: Synthetic peptide
SVSSA

SEQ ID NO: 2 - protein, 7 aa, Artificial Sequence
  Description of Artificial Sequence: Synthetic peptide
SASSLYS

SEQ ID NO: 3 - protein, 6 aa, Artificial Sequence
  Description of Artificial Sequence: Synthetic peptide
WYYAPI

SEQ ID NO: 4 - protein, 6 aa, Artificial Sequence
  Description of Artificial Sequence: Synthetic peptide
GNYGPI

SEQ ID NO: 5 - protein, 6 aa, Artificial Sequence
  Description of Artificial Sequence: Synthetic peptide
GYYAPI

SEQ ID NO: 6 - protein, 6 aa, Artificial Sequence
  Description of Artificial Sequence: Synthetic peptide
GYYALI

SEQ ID NO: 7 - protein, 6 aa, Artificial Sequence
  Description of Artificial Sequence: Synthetic peptide
WYFAPI

SEQ ID NO: 8 - protein, 6 aa, Artificial Sequence
  Description of Artificial Sequence: Synthetic peptide
GYNAPI

SEQ ID NO: 9 - protein, 6 aa, Artificial Sequence
  Description of Artificial Sequence: Synthetic peptide
GYFAPI

SEQ ID NO: 10 - protein, 6 aa, Artificial Sequence
  Description of Artificial Sequence: Synthetic peptide
WFNAPI

SEQ ID NO: 11 - protein, 6 aa, Artificial Sequence
  Description of Artificial Sequence: Synthetic peptide
SNYAPI

SEQ ID NO: 12 - protein, 6 aa, Artificial Sequence
  Description of Artificial Sequence: Synthetic peptide
WYNAPI

SEQ ID NO: 13 - protein, 6 aa, Artificial Sequence
  Description of Artificial Sequence: Synthetic peptide
GFYAPI

SEQ ID NO: 14 - protein, 6 aa, Artificial Sequence
  Description of Artificial Sequence: Synthetic peptide
GYSAPI

SEQ ID NO: 15 - protein, 6 aa, Artificial Sequence
  Description of Artificial Sequence: Synthetic peptide
GYAGLI

SEQ ID NO: 16 - protein, 6 aa, Artificial Sequence
  Description of Artificial Sequence: Synthetic peptide
GFSSPI

SEQ ID NO: 17 - protein, 6 aa, Artificial Sequence
  Description of Artificial Sequence: Synthetic peptide
GHYAPI

SEQ ID NO: 18 - protein, 6 aa, Artificial Sequence
  Description of Artificial Sequence: Synthetic peptide
SFYAPI

SEQ ID NO: 19 - protein, 6 aa, Artificial Sequence
  Description of Artificial Sequence: Synthetic peptide
GYRAPI

SEQ ID NO: 20 - protein, 6 aa, Artificial Sequence
  Description of Artificial Sequence: Synthetic peptide
WHRAPI

SEQ ID NO: 21 - protein, 6 aa, Artificial Sequence
  Description of Artificial Sequence: Synthetic peptide
GDFAPF

SEQ ID NO: 22 - protein, 6 aa, Artificial Sequence
  Description of Artificial Sequence: Synthetic peptide
GYSSPI

SEQ ID NO: 23 - protein, 6 aa, Artificial Sequence
  Description of Artificial Sequence: Synthetic peptide
WFYAPI

SEQ ID NO: 24 - protein, 6 aa, Artificial Sequence
  Description of Artificial Sequence: Synthetic peptide
LSSYSM

SEQ ID NO: 25 - protein, 6 aa, Artificial Sequence
  Description of Artificial Sequence: Synthetic peptide
IAFYSI

SEQ ID NO: 26 - protein, 6 aa, Artificial Sequence
  Description of Artificial Sequence: Synthetic peptide
IYSYSI

SEQ ID NO: 27 - protein, 6 aa, Artificial Sequence
  Description of Artificial Sequence: Synthetic peptide
ISSYSI

SEQ ID NO: 28 - protein, 6 aa, Artificial Sequence
  Description of Artificial Sequence: Synthetic peptide
ISAYSI

SEQ ID NO: 29 - protein, 6 aa, Artificial Sequence
  Description of Artificial Sequence: Synthetic peptide
LSSYSI

SEQ ID NO: 30 - protein, 6 aa, Artificial Sequence
  Description of Artificial Sequence: Synthetic peptide
LYSYSM

SEQ ID NO: 31 - protein, 6 aa, Artificial Sequence
  Description of Artificial Sequence: Synthetic peptide
LTSYSM

SEQ ID NO: 32 - protein, 6 aa, Artificial Sequence
  Description of Artificial Sequence: Synthetic peptide
ISSYSM

SEQ ID NO: 33 - protein, 6 aa, Artificial Sequence
  Description of Artificial Sequence: Synthetic peptide
LFSYPM

SEQ ID NO: 34 - protein, 6 aa, Artificial Sequence
  Description of Artificial Sequence: Synthetic peptide
LSAYSM

SEQ ID NO: 35 - protein, 6 aa, Artificial Sequence
  Description of Artificial Sequence: Synthetic peptide
ISSHSM

SEQ ID NO: 36 - protein, 6 aa, Artificial Sequence
  Description of Artificial Sequence: Synthetic peptide
ISAYAM

SEQ ID NO: 37 - protein, 6 aa, Artificial Sequence
  Description of Artificial Sequence: Synthetic peptide
ISTYSM

SEQ ID NO: 38 - protein, 6 aa, Artificial Sequence
  Description of Artificial Sequence: Synthetic peptide
LHAFSM

SEQ ID NO: 39 - protein, 6 aa, Artificial Sequence
  Description of Artificial Sequence: Synthetic peptide
ISGYSI

SEQ ID NO: 40 - protein, 6 aa, Artificial Sequence
  Description of Artificial Sequence: Synthetic peptide
ISNYSI

SEQ ID NO: 41 - protein, 6 aa, Artificial Sequence
  Description of Artificial Sequence: Synthetic peptide
ISAYSM

SEQ ID NO: 42 - protein, 6 aa, Artificial Sequence
  Description of Artificial Sequence: Synthetic peptide
LTSYAM

SEQ ID NO: 43 - protein, 6 aa, Artificial Sequence
  Description of Artificial Sequence: Synthetic peptide
LYSYSI

SEQ ID NO: 44 - protein, 6 aa, Artificial Sequence
  Description of Artificial Sequence: Synthetic peptide
LSSFSM

SEQ ID NO: 45 - protein, 6 aa, Artificial Sequence
  Description of Artificial Sequence: Synthetic peptide
IASYSI

SEQ ID NO: 46 - protein, 6 aa, Artificial Sequence
  Description of Artificial Sequence: Synthetic peptide
IHSNSM

SEQ ID NO: 47 - protein, 6 aa, Artificial Sequence
  Description of Artificial Sequence: Synthetic peptide
LSTNSM

SEQ ID NO: 48 - protein, 6 aa, Artificial Sequence
  Description of Artificial Sequence: Synthetic peptide
LHSFSM

SEQ ID NO: 49 - protein, 6 aa, Artificial Sequence
  Description of Artificial Sequence: Synthetic peptide
ISSFSI

SEQ ID NO: 50 - protein, 6 aa, Artificial Sequence
  Description of Artificial Sequence: Synthetic peptide
LPYYSM

SEQ ID NO: 51 - protein, 10 aa, Artificial Sequence
  Description of Artificial Sequence: Synthetic peptide
YISSYYGYTY

SEQ ID NO: 52 - protein, 10 aa, Artificial Sequence
  Description of Artificial Sequence: Synthetic peptide
YISPFSGITH

SEQ ID NO: 53 - protein, 10 aa, Artificial Sequence
  Description of Artificial Sequence: Synthetic peptide
YISPYYSYTY

SEQ ID NO: 54 - protein, 10 aa, Artificial Sequence
  Description of Artificial Sequence: Synthetic peptide
YISSYAGYTS

SEQ ID NO: 55 - protein, 10 aa, Artificial Sequence
  Description of Artificial Sequence: Synthetic peptide
YISPYFGLTG

SEQ ID NO: 56 - protein, 10 aa, Artificial Sequence
  Description of Artificial Sequence: Synthetic peptide
FISSFYGYTD

SEQ ID NO: 57 - protein, 10 aa, Artificial Sequence
  Description of Artificial Sequence: Synthetic peptide
YISSYYGSTY

SEQ ID NO: 58 - protein, 10 aa, Artificial Sequence
  Description of Artificial Sequence: Synthetic peptide
YISSYYSYTY

SEQ ID NO: 59 - protein, 10 aa, Artificial Sequence
  Description of Artificial Sequence: Synthetic peptide
YISPYYGYTN

SEQ ID NO: 60 - protein, 10 aa, Artificial Sequence
  Description of Artificial Sequence: Synthetic peptide
YISPFFSFTH

SEQ ID NO: 61 - protein, 10 aa, Artificial Sequence
  Description of Artificial Sequence: Synthetic peptide
YISSYDSITD

SEQ ID NO: 62 - protein, 10 aa, Artificial Sequence
  Description of Artificial Sequence: Synthetic peptide
YISSYYSYTA

SEQ ID NO: 63 - protein, 10 aa, Artificial Sequence
  Description of Artificial Sequence: Synthetic peptide
YISPYYGYTF

SEQ ID NO: 64 - protein, 10 aa, Artificial Sequence
  Description of Artificial Sequence: Synthetic peptide
YISPHYGFTS

SEQ ID NO: 65 - protein, 10 aa, Artificial Sequence
  Description of Artificial Sequence: Synthetic peptide
YISPYYGYTY

SEQ ID NO: 66 - protein, 10 aa, Artificial Sequence
  Description of Artificial Sequence: Synthetic peptide
YISSYYGYTF

SEQ ID NO: 67 - protein, 10 aa, Artificial Sequence
  Description of Artificial Sequence: Synthetic peptide
IISSNFGYTS

SEQ ID NO: 68 - protein, 10 aa, Artificial Sequence
  Description of Artificial Sequence: Synthetic peptide
SISSYYGFTS

SEQ ID NO: 69 - protein, 10 aa, Artificial Sequence
  Description of Artificial Sequence: Synthetic peptide
YISPSYGSTY

SEQ ID NO: 70 - protein, 10 aa, Artificial Sequence
  Description of Artificial Sequence: Synthetic peptide
YISSFNGSTF

SEQ ID NO: 71 - protein, 10 aa, Artificial Sequence
  Description of Artificial Sequence: Synthetic peptide
YISPYYSFTS

SEQ ID NO: 72 - protein, 10 aa, Artificial Sequence
  Description of Artificial Sequence: Synthetic peptide
YISPYYSFTY

SEQ ID NO: 73 - protein, 10 aa, Artificial Sequence
  Description of Artificial Sequence: Synthetic peptide
FISSYYGYTY

SEQ ID NO: 74 - protein, 10 aa, Artificial Sequence
  Description of Artificial Sequence: Synthetic peptide
SISPYYSYTN

SEQ ID NO: 75 - protein, 10 aa, Artificial Sequence
  Description of Artificial Sequence: Synthetic peptide
FINPYYSYTY

SEQ ID NO: 76 - protein, 10 aa, Artificial Sequence
  Description of Artificial Sequence: Synthetic peptide
YISSYYDYTY

SEQ ID NO: 77 - protein, 10 aa, Artificial Sequence
  Description of Artificial Sequence: Synthetic peptide
IISSYFGFTY

SEQ ID NO: 78 - protein, 10 aa, Artificial Sequence
  Description of Artificial Sequence: Synthetic peptide
YISSNFGSTY

SEQ ID NO: 79 - protein, 8 aa, Artificial Sequence
  Description of Artificial Sequence: Synthetic peptide
PAPGHWGF

SEQ ID NO: 80 - protein, 8 aa, Artificial Sequence
  Description of Artificial Sequence: Synthetic peptide
PAVGHLAM

SEQ ID NO: 81 - protein, 8 aa, Artificial Sequence
  Description of Artificial Sequence: Synthetic peptide
STVGHGGM

SEQ ID NO: 82 - protein, 8 aa, Artificial Sequence
  Description of Artificial Sequence: Synthetic peptide
PAPAHWGF

SEQ ID NO: 83 - protein, 8 aa, Artificial Sequence
  Description of Artificial Sequence: Synthetic peptide
PALGHAGM

SEQ ID NO: 84 - protein, 8 aa, Artificial Sequence
  Description of Artificial Sequence: Synthetic peptide
PAPGHWGM

SEQ ID NO: 85 - protein, 8 aa, Artificial Sequence
  Description of Artificial Sequence: Synthetic peptide
PVAGHGGM

SEQ ID NO: 86 - protein, 8 aa, Artificial Sequence
  Description of Artificial Sequence: Synthetic peptide
PAVGHLAL

SEQ ID NO: 87 - protein, 8 aa, Artificial Sequence
  Description of Artificial Sequence: Synthetic peptide
PAPGYGAL

SEQ ID NO: 88 - protein, 8 aa, Artificial Sequence
  Description of Artificial Sequence: Synthetic peptide
QTAGHAGM

SEQ ID NO: 89 - protein, 8 aa, Artificial Sequence
  Description of Artificial Sequence: Synthetic peptide
QAPGVSGI

SEQ ID NO: 90 - protein, 8 aa, Artificial Sequence
  Description of Artificial Sequence: Synthetic peptide
PAVGHMAF

SEQ ID NO: 91 - protein, 8 aa, Artificial Sequence
  Description of Artificial Sequence: Synthetic peptide
PTPGHGGL

SEQ ID NO: 92 - protein, 8 aa, Artificial Sequence
  Description of Artificial Sequence: Synthetic peptide
PAPGHGGM

SEQ ID NO: 93 - protein, 8 aa, Artificial Sequence
  Description of Artificial Sequence: Synthetic peptide
PAVGHLGM

SEQ ID NO: 94 - protein, 8 aa, Artificial Sequence
  Description of Artificial Sequence: Synthetic peptide
PAPGHWGL

SEQ ID NO: 95 - protein, 8 aa, Artificial Sequence
  Description of Artificial Sequence: Synthetic peptide
TAPGHGAF

SEQ ID NO: 96 - protein, 8 aa, Artificial Sequence
  Description of Artificial Sequence: Synthetic peptide
PALGHLAM

SEQ ID NO: 97 - protein, 8 aa, Artificial Sequence
  Description of Artificial Sequence: Synthetic peptide
LAPGHPAL

SEQ ID NO: 98 - protein, 8 aa, Artificial Sequence
  Description of Artificial Sequence: Synthetic peptide
PAAGHLAL

SEQ ID NO: 99 - protein, 8 aa, Artificial Sequence
  Description of Artificial Sequence: Synthetic peptide
PIPGHLAF

SEQ ID NO: 100 - protein, 8 aa, Artificial Sequence
  Description of Artificial Sequence: Synthetic peptide
PTWAHGAF

SEQ ID NO: 101 - protein, 8 aa, Artificial Sequence
  Description of Artificial Sequence: Synthetic peptide
PVLAHSAF

SEQ ID NO: 102 - protein, 8 aa, Artificial Sequence
  Description of Artificial Sequence: Synthetic peptide
QTPGHSGM

SEQ ID NO: 103 - protein, 8 aa, Artificial Sequence
  Description of Artificial Sequence: Synthetic peptide
QAPGPWGM

SEQ ID NO: 104 - protein, 8 aa, Artificial Sequence
  Description of Artificial Sequence: Synthetic peptide
PAPGHGAF

SEQ ID NO: 105 - protein, 8 aa, Artificial Sequence
  Description of Artificial Sequence: Synthetic peptide
PTTAHMAL

SEQ ID NO: 106 - protein, 8 aa, Artificial Sequence
  Description of Artificial Sequence: Synthetic peptide
PTPGHSGF

SEQ ID NO: 107 - protein, 8 aa, Artificial Sequence
  Description of Artificial Sequence: Synthetic peptide
PAVGHGAL

SEQ ID NO: 108 - protein, 8 aa, Artificial Sequence
  Description of Artificial Sequence: Synthetic peptide
TAPGHPAM

SEQ ID NO: 109 - protein, 8 aa, Artificial Sequence
  Description of Artificial Sequence: Synthetic peptide
PVPAHGAF

SEQ ID NO: 110 - protein, 6 aa, Artificial Sequence
  Description of Artificial Sequence: Synthetic peptide
ASYYLI

SEQ ID NO: 111 - protein, 6 aa, Artificial Sequence
  Description of Artificial Sequence: Synthetic peptide
SNYALI

SEQ ID NO: 112 - protein, 6 aa, Artificial Sequence
  Description of Artificial Sequence: Synthetic peptide
SSSFLI

SEQ ID NO: 113 - protein, 6 aa, Artificial Sequence
  Description of Artificial Sequence: Synthetic peptide
SSDSLI

SEQ ID NO: 114 - protein, 6 aa, Artificial Sequence
  Description of Artificial Sequence: Synthetic peptide
STHFLI

SEQ ID NO: 115 - protein, 6 aa, Artificial Sequence
  Description of Artificial Sequence: Synthetic peptide
ASYSLI

SEQ ID NO: 116 - protein, 6 aa, Artificial Sequence
  Description of Artificial Sequence: Synthetic peptide
SAYTLI

SEQ ID NO: 117 - protein, 6 aa, Artificial Sequence
  Description of Artificial Sequence: Synthetic peptide
SSVSLI

SEQ ID NO: 118 - protein, 6 aa, Artificial Sequence
  Description of Artificial Sequence: Synthetic peptide
SYYSLI

SEQ ID NO: 119 - protein, 6 aa, Artificial Sequence
  Description of Artificial Sequence: Synthetic peptide
SSYYLI

SEQ ID NO: 120 - protein, 6 aa, Artificial Sequence
  Description of Artificial Sequence: Synthetic peptide
AYYFLI

SEQ ID NO: 121 - protein, 6 aa, Artificial Sequence
  Description of Artificial Sequence: Synthetic peptide
SSFSLI

SEQ ID NO: 122 - protein, 6 aa, Artificial Sequence
  Description of Artificial Sequence: Synthetic peptide
SAYSLI

SEQ ID NO: 123 - protein, 6 aa, Artificial Sequence
  Description of Artificial Sequence: Synthetic peptide
SSYALI

SEQ ID NO: 124 - protein, 6 aa, Artificial Sequence
  Description of Artificial Sequence: Synthetic peptide
SYFSLI

SEQ ID NO: 125 - protein, 6 aa, Artificial Sequence
  Description of Artificial Sequence: Synthetic peptide
SRFTLI

SEQ ID NO: 126 - protein, 6 aa, Artificial Sequence
  Description of Artificial Sequence: Synthetic peptide
SSNTLI

SEQ ID NO: 127 - protein, 6 aa, Artificial Sequence
  Description of Artificial Sequence: Synthetic peptide
SSFALI

SEQ ID NO: 128 - protein, 6 aa, Artificial Sequence
  Description of Artificial Sequence: Synthetic peptide
ANYALI

SEQ ID NO: 129 - protein, 6 aa, Artificial Sequence
  Description of Artificial Sequence: Synthetic peptide
SSASLI

SEQ ID NO: 130 - protein, 6 aa, Artificial Sequence
  Description of Artificial Sequence: Synthetic peptide
SSYSLI

SEQ ID NO: 131 - protein, 6 aa, Artificial Sequence
  Description of Artificial Sequence: Synthetic peptide
SAFYLI

SEQ ID NO: 132 - protein, 6 aa, Artificial Sequence
  Description of Artificial Sequence: Synthetic peptide
SAYFLI

SEQ ID NO: 133 - protein, 6 aa, Artificial Sequence
  Description of Artificial Sequence: Synthetic peptide
ASSSLI

SEQ ID NO: 134 - protein, 6 aa, Artificial Sequence
  Description of Artificial Sequence: Synthetic peptide
SIYSLI

SEQ ID NO: 135 - protein, 6 aa, Artificial Sequence
  Description of Artificial Sequence: Synthetic peptide
STGSLI

SEQ ID NO: 136 - protein, 6 aa, Artificial Sequence
  Description of Artificial Sequence: Synthetic peptide
SSHSLI

SEQ ID NO: 137 - protein, 6 aa, Artificial Sequence
  Description of Artificial Sequence: Synthetic peptide
SSYTLI

SEQ ID NO: 138 - protein, 6 aa, Artificial Sequence
  Description of Artificial Sequence: Synthetic peptide
SYHYLI

SEQ ID NO: 139 - protein, 6 aa, Artificial Sequence
  Description of Artificial Sequence: Synthetic peptide
STYFFI

SEQ ID NO: 140 - protein, 6 aa, Artificial Sequence
  Description of Artificial Sequence: Synthetic peptide
TSFYFM

SEQ ID NO: 141 - protein, 6 aa, Artificial Sequence
  Description of Artificial Sequence: Synthetic peptide
SSFYFI

SEQ ID NO: 142 - protein, 6 aa, Artificial Sequence
  Description of Artificial Sequence: Synthetic peptide
SAYYFI

SEQ ID NO: 143 - protein, 6 aa, Artificial Sequence
  Description of Artificial Sequence: Synthetic peptide
SYFYFM

SEQ ID NO: 144 - protein, 6 aa, Artificial Sequence
  Description of Artificial Sequence: Synthetic peptide
TSFYYM

SEQ ID NO: 145 - protein, 6 aa, Artificial Sequence
  Description of Artificial Sequence: Synthetic peptide
FTFYFM

SEQ ID NO: 146 - protein, 6 aa, Artificial Sequence
  Description of Artificial Sequence: Synthetic peptide
SSYYFI

SEQ ID NO: 147 - protein, 6 aa, Artificial Sequence
  Description of Artificial Sequence: Synthetic peptide
SSFYVM

SEQ ID NO: 148 - protein, 6 aa, Artificial Sequence
  Description of Artificial Sequence: Synthetic peptide
SSFYFM

SEQ ID NO: 149 - protein, 6 aa, Artificial Sequence
  Description of Artificial Sequence: Synthetic peptide
SSFYYI

SEQ ID NO: 150 - protein, 6 aa, Artificial Sequence
  Description of Artificial Sequence: Synthetic peptide
STFYFM

SEQ ID NO: 151 - protein, 6 aa, Artificial Sequence
  Description of Artificial Sequence: Synthetic peptide
SAFYYM

SEQ ID NO: 152 - protein, 6 aa, Artificial Sequence
  Description of Artificial Sequence: Synthetic peptide
ASFYFM

SEQ ID NO: 153 - protein, 6 aa, Artificial Sequence
  Description of Artificial Sequence: Synthetic peptide
SAFYFI

SEQ ID NO: 154 - protein, 6 aa, Artificial Sequence
  Description of Artificial Sequence: Synthetic peptide
FPFYFM

SEQ ID NO: 155 - protein, 6 aa, Artificial Sequence
  Description of Artificial Sequence: Synthetic peptide
SAFYFM

SEQ ID NO: 156 - protein, 6 aa, Artificial Sequence
  Description of Artificial Sequence: Synthetic peptide
ASYYFM

SEQ ID NO: 157 - protein, 6 aa, Artificial Sequence
  Description of Artificial Sequence: Synthetic peptide
SVFYFM

SEQ ID NO: 158 - protein, 6 aa, Artificial Sequence
  Description of Artificial Sequence: Synthetic peptide
SSLYYM

SEQ ID NO: 159 - protein, 6 aa, Artificial Sequence
  Description of Artificial Sequence: Synthetic peptide
SNFYLM

SEQ ID NO: 160 - protein, 6 aa, Artificial Sequence
  Description of Artificial Sequence: Synthetic peptide
FSFYFI

SEQ ID NO: 161 - protein, 6 aa, Artificial Sequence
  Description of Artificial Sequence: Synthetic peptide
SSLYFM

SEQ ID NO: 162 - protein, 6 aa, Artificial Sequence
  Description of Artificial Sequence: Synthetic peptide
YYFYYM

SEQ ID NO: 163 - protein, 6 aa, Artificial Sequence
  Description of Artificial Sequence: Synthetic peptide
TSYYFI

SEQ ID NO: 164 - protein, 6 aa, Artificial Sequence
  Description of Artificial Sequence: Synthetic peptide
SDFYFI

SEQ ID NO: 165 - protein, 6 aa, Artificial Sequence
  Description of Artificial Sequence: Synthetic peptide
SSFYYM

SEQ ID NO: 166 - protein, 10 aa, Artificial Sequence
  Description of Artificial Sequence: Synthetic peptide
TIYPYLNSTY

SEQ ID NO: 167 - protein, 10 aa, Artificial Sequence
  Description of Artificial Sequence: Synthetic peptide
SVYPYLDNTY

SEQ ID NO: 168 - protein, 10 aa, Artificial Sequence
  Description of Artificial Sequence: Synthetic peptide
TVYSYIDITY

SEQ ID NO: 169 - protein, 10 aa, Artificial Sequence
  Description of Artificial Sequence: Synthetic peptide
TVYPYRGYTY

SEQ ID NO: 170 - protein, 10 aa, Artificial Sequence
  Description of Artificial Sequence: Synthetic peptide
SVYPYLSYTY

SEQ ID NO: 171 - protein, 10 aa, Artificial Sequence
  Description of Artificial Sequence: Synthetic peptide
SVYPYLDFTY

SEQ ID NO: 172 - protein, 10 aa, Artificial Sequence
  Description of Artificial Sequence: Synthetic peptide
AIYPYLDYTY

SEQ ID NO: 173 - protein, 10 aa, Artificial Sequence
  Description of Artificial Sequence: Synthetic peptide
SIYPYLNYTF

SEQ ID NO: 174 - protein, 10 aa, Artificial Sequence
  Description of Artificial Sequence: Synthetic peptide
TIYPYSDNTY

SEQ ID NO: 175 - protein, 10 aa, Artificial Sequence
  Description of Artificial Sequence: Synthetic peptide
SIYSYGNITY

SEQ ID NO: 176 - protein, 10 aa, Artificial Sequence
  Description of Artificial Sequence: Synthetic peptide
AIYPYLSYTY

SEQ ID NO: 177 - protein, 10 aa, Artificial Sequence
  Description of Artificial Sequence: Synthetic peptide
TVFPYLGRTY

SEQ ID NO: 178 - protein, 10 aa, Artificial Sequence
  Description of Artificial Sequence: Synthetic peptide
SVYPYLNYTY

SEQ ID NO: 179 - protein, 10 aa, Artificial Sequence
  Description of Artificial Sequence: Synthetic peptide
TVYPYLSYTY

SEQ ID NO: 180 - protein, 10 aa, Artificial Sequence
  Description of Artificial Sequence: Synthetic peptide
TVYPYLNHTY

SEQ ID NO: 181 - protein, 10 aa, Artificial Sequence
  Description of Artificial Sequence: Synthetic peptide
SIYPYLSYTY

SEQ ID NO: 182 - protein, 10 aa, Artificial Sequence
  Description of Artificial Sequence: Synthetic peptide
SVYPYLNDTY

SEQ ID NO: 183 - protein, 10 aa, Artificial Sequence
  Description of Artificial Sequence: Synthetic peptide
SVYSSLSHTY

SEQ ID NO: 184 - protein, 10 aa, Artificial Sequence
  Description of Artificial Sequence: Synthetic peptide
SVYPYNDITY

SEQ ID NO: 185 - protein, 10 aa, Artificial Sequence
  Description of Artificial Sequence: Synthetic peptide
SVYPYLDNTH

SEQ ID NO: 186 - protein, 10 aa, Artificial Sequence
  Description of Artificial Sequence: Synthetic peptide
SIYSYLNYTF

SEQ ID NO: 187 - protein, 10 aa, Artificial Sequence
  Description of Artificial Sequence: Synthetic peptide
SIYPYLDFTH

SEQ ID NO: 188 - protein, 10 aa, Artificial Sequence
  Description of Artificial Sequence: Synthetic peptide
AIYPYIGYTY

SEQ ID NO: 189 - protein, 10 aa, Artificial Sequence
  Description of Artificial Sequence: Synthetic peptide
TIYPFRGTTY

SEQ ID NO: 190 - protein, 10 aa, Artificial Sequence
  Description of Artificial Sequence: Synthetic peptide
AIYPYLGYTY

SEQ ID NO: 191 - protein, 10 aa, Artificial Sequence
  Description of Artificial Sequence: Synthetic peptide
SVYPYLGDTY

SEQ ID NO: 192 - protein, 10 aa, Artificial Sequence
  Description of Artificial Sequence: Synthetic peptide
SVYSYLGYTF

SEQ ID NO: 193 - protein, 10 aa, Artificial Sequence
  Description of Artificial Sequence: Synthetic peptide
TVYPYLSHTY

SEQ ID NO: 194 - protein, 10 aa, Artificial Sequence
  Description of Artificial Sequence: Synthetic peptide
TIYPFIGNTY

SEQ ID NO: 195 - protein, 10 aa, Artificial Sequence
  Description of Artificial Sequence: Synthetic peptide
SVYPYVDYTY

SEQ ID NO: 196 - protein, 10 aa, Artificial Sequence
  Description of Artificial Sequence: Synthetic peptide
TVYPYLSFTY

SEQ ID NO: 197 - protein, 10 aa, Artificial Sequence
  Description of Artificial Sequence: Synthetic peptide
SVYPYLDDTY

SEQ ID NO: 198 - protein, 9 aa, Artificial Sequence
  Description of Artificial Sequence: Synthetic peptide
AYPGSYHPL

SEQ ID NO: 199 - protein, 9 aa, Artificial Sequence
  Description of Artificial Sequence: Synthetic peptide
AFPGSYHPM

SEQ ID NO: 200 - protein, 9 aa, Artificial Sequence
  Description of Artificial Sequence: Synthetic peptide
AFPFSYHPM

SEQ ID NO: 201 - protein, 9 aa, Artificial Sequence
  Description of Artificial Sequence: Synthetic peptide
GYPLAYTPL

SEQ ID NO: 202 - protein, 9 aa, Artificial Sequence
  Description of Artificial Sequence: Synthetic peptide
ALQGHYHPM

SEQ ID NO: 203 - protein, 9 aa, Artificial Sequence
  Description of Artificial Sequence: Synthetic peptide
AFPGSYLPM

SEQ ID NO: 204 - protein, 9 aa, Artificial Sequence
  Description of Artificial Sequence: Synthetic peptide
GFPGRYHPL

SEQ ID NO: 205 - protein, 9 aa, Artificial Sequence
  Description of Artificial Sequence: Synthetic peptide
AFPLSYHPM

SEQ ID NO: 206 - protein, 9 aa, Artificial Sequence
  Description of Artificial Sequence: Synthetic peptide
AFPGRYHGM

SEQ ID NO: 207 - protein, 9 aa, Artificial Sequence
  Description of Artificial Sequence: Synthetic peptide
AFPFSYTPL

SEQ ID NO: 208 - protein, 9 aa, Artificial Sequence
  Description of Artificial Sequence: Synthetic peptide
AFPGAYSPM

SEQ ID NO: 209 - protein, 9 aa, Artificial Sequence
  Description of Artificial Sequence: Synthetic peptide
AFPGAYHPM

SEQ ID NO: 210 - protein, 9 aa, Artificial Sequence
  Description of Artificial Sequence: Synthetic peptide
AFPGAYHPF

SEQ ID NO: 211 - protein, 9 aa, Artificial Sequence
  Description of Artificial Sequence: Synthetic peptide
AYPGFYHPI

SEQ ID NO: 212 - protein, 9 aa, Artificial Sequence
  Description of Artificial Sequence: Synthetic peptide
AYPLSYHPM

SEQ ID NO: 213 - protein, 9 aa, Artificial Sequence
  Description of Artificial Sequence: Synthetic peptide
ALPGFYHPF

SEQ ID NO: 214 - protein, 9 aa, Artificial Sequence
  Description of Artificial Sequence: Synthetic peptide
GFPGTYHPL

SEQ ID NO: 215 - protein, 9 aa, Artificial Sequence
  Description of Artificial Sequence: Synthetic peptide
AIPGFYHPI

SEQ ID NO: 216 - protein, 9 aa, Artificial Sequence
  Description of Artificial Sequence: Synthetic peptide
AFPGSYHPL

SEQ ID NO: 217 - protein, 9 aa, Artificial Sequence
  Description of Artificial Sequence: Synthetic peptide
PFPASYHPL

SEQ ID NO: 218 - protein, 9 aa, Artificial Sequence
  Description of Artificial Sequence: Synthetic peptide
AYPGRYHPL

SEQ ID NO: 219 - protein, 9 aa, Artificial Sequence
  Description of Artificial Sequence: Synthetic peptide
AFPGFYHPF

SEQ ID NO: 220 - protein, 9 aa, Artificial Sequence
  Description of Artificial Sequence: Synthetic peptide
AFPGSYHPF

SEQ ID NO: 221 - protein, 9 aa, Artificial Sequence
  Description of Artificial Sequence: Synthetic peptide
AFPGFYHPM

SEQ ID NO: 222 - protein, 9 aa, Artificial Sequence
  Description of Artificial Sequence: Synthetic peptide
ALPGSYHPF

SEQ ID NO: 223 - protein, 9 aa, Artificial Sequence
  Description of Artificial Sequence: Synthetic peptide
WYSGVHGLI

SEQ ID NO: 224 - protein, 9 aa, Artificial Sequence
  Description of Artificial Sequence: Synthetic peptide
WFSSAHVPF

SEQ ID NO: 225 - protein, 9 aa, Artificial Sequence
  Description of Artificial Sequence: Synthetic peptide
WYSYGHHLI

SEQ ID NO: 226 - protein, 9 aa, Artificial Sequence
  Description of Artificial Sequence: Synthetic peptide
WYTSGHVLI

SEQ ID NO: 227 - protein, 9 aa, Artificial Sequence
  Description of Artificial Sequence: Synthetic peptide
WYASDHGLI

SEQ ID NO: 228 - protein, 9 aa, Artificial Sequence
  Description of Artificial Sequence: Synthetic peptide
WFSPGNVLI

SEQ ID NO: 229 - protein, 9 aa, Artificial Sequence
  Description of Artificial Sequence: Synthetic peptide
WYSTRNILI

SEQ ID NO: 230 - protein, 9 aa, Artificial Sequence
  Description of Artificial Sequence: Synthetic peptide
WYFSDHDLF

SEQ ID NO: 231 - protein, 9 aa, Artificial Sequence
  Description of Artificial Sequence: Synthetic peptide
WYSSGDVLI

SEQ ID NO: 232 - protein, 9 aa, Artificial Sequence
  Description of Artificial Sequence: Synthetic peptide
WYSSADVLF

SEQ ID NO: 233 - protein, 9 aa, Artificial Sequence
  Description of Artificial Sequence: Synthetic peptide
WYSSGHGLI

SEQ ID NO: 234 - protein, 9 aa, Artificial Sequence
  Description of Artificial Sequence: Synthetic peptide
WYSSGHALI

SEQ ID NO: 235 - protein, 9 aa, Artificial Sequence
  Description of Artificial Sequence: Synthetic peptide
WYSSNHIPI

SEQ ID NO: 236 - protein, 9 aa, Artificial Sequence
  Description of Artificial Sequence: Synthetic peptide
WYSSSNVLI

SEQ ID NO: 237 - protein, 9 aa, Artificial Sequence
  Description of Artificial Sequence: Synthetic peptide
WYFSDRVLI

SEQ ID NO: 238 - protein, 9 aa, Artificial Sequence
  Description of Artificial Sequence: Synthetic peptide
WYPSSHVLI

SEQ ID NO: 239 - protein, 9 aa, Artificial Sequence
  Description of Artificial Sequence: Synthetic peptide
WYSSRHHLI

SEQ ID NO: 240 - protein, 9 aa, Artificial Sequence
  Description of Artificial Sequence: Synthetic peptide
WYSTGRVLF

SEQ ID NO: 241 - protein, 9 aa, Artificial Sequence
  Description of Artificial Sequence: Synthetic peptide
WFPTGHVLF

SEQ ID NO: 242 - protein, 9 aa, Artificial Sequence
  Description of Artificial Sequence: Synthetic peptide
WYAPRHVLI

SEQ ID NO: 243 - protein, 9 aa, Artificial Sequence
  Description of Artificial Sequence: Synthetic peptide
WFTSGLVLF

SEQ ID NO: 244 - protein, 9 aa, Artificial Sequence
  Description of Artificial Sequence: Synthetic peptide
WYSSGHVLF

SEQ ID NO: 245 - protein, 9 aa, Artificial Sequence
  Description of Artificial Sequence: Synthetic peptide
WYPGAPVLI

SEQ ID NO: 246 - protein, 9 aa, Artificial Sequence
  Description of Artificial Sequence: Synthetic peptide
WYSSANALF

SEQ ID NO: 247 - protein, 9 aa, Artificial Sequence
  Description of Artificial Sequence: Synthetic peptide
WYSSNHVLI

SEQ ID NO: 248 - protein, 9 aa, Artificial Sequence
  Description of Artificial Sequence: Synthetic peptide
WYSAAHILF

SEQ ID NO: 249 - protein, 9 aa, Artificial Sequence
  Description of Artificial Sequence: Synthetic peptide
WFASGHVLI

SEQ ID NO: 250 - protein, 9 aa, Artificial Sequence
  Description of Artificial Sequence: Synthetic peptide
WFSSGDSLI

SEQ ID NO: 251 - protein, 9 aa, Artificial Sequence
  Description of Artificial Sequence: Synthetic peptide
WYASGNVLI

SEQ ID NO: 252 - protein, 9 aa, Artificial Sequence
  Description of Artificial Sequence: Synthetic peptide
WFSPGHLLI

SEQ ID NO: 253 - protein, 9 aa, Artificial Sequence
  Description of Artificial Sequence: Synthetic peptide
WYPSGHVLF

SEQ ID NO: 254 - protein, 9 aa, Artificial Sequence
  Description of Artificial Sequence: Synthetic peptide
WFAAGHVLI

SEQ ID NO: 255 - protein, 9 aa, Artificial Sequence
  Description of Artificial Sequence: Synthetic peptide
WFRSAHVLI

SEQ ID NO: 256 - protein, 9 aa, Artificial Sequence
  Description of Artificial Sequence: Synthetic peptide
WFASGHILI

SEQ ID NO: 257 - protein, 9 aa, Artificial Sequence
  Description of Artificial Sequence: Synthetic peptide
WFSGGHALI

SEQ ID NO: 258 - protein, 9 aa, Artificial Sequence
  Description of Artificial Sequence: Synthetic peptide
WFASAHVLF

SEQ ID NO: 259 - protein, 9 aa, Artificial Sequence
  Description of Artificial Sequence: Synthetic peptide
WYSPGHVLI

SEQ ID NO: 260 - protein, 9 aa, Artificial Sequence
  Description of Artificial Sequence: Synthetic peptide
WYASGLVLI

SEQ ID NO: 261 - protein, 9 aa, Artificial Sequence
  Description of Artificial Sequence: Synthetic peptide
WYTSGHVLF

SEQ ID NO: 262 - protein, 9 aa, Artificial Sequence
  Description of Artificial Sequence: Synthetic peptide
WFSFPHALI

SEQ ID NO: 263 - protein, 9 aa, Artificial Sequence
  Description of Artificial Sequence: Synthetic peptide
WYASGTDLI

SEQ ID NO: 264 - protein, 9 aa, Artificial Sequence
  Description of Artificial Sequence: Synthetic peptide
WYSSGRLLI

SEQ ID NO: 265 - protein, 9 aa, Artificial Sequence
  Description of Artificial Sequence: Synthetic peptide
WFSSPHVLF

SEQ ID NO: 266 - protein, 9 aa, Artificial Sequence
  Description of Artificial Sequence: Synthetic peptide
WFASASSLF

SEQ ID NO: 267 - protein, 9 aa, Artificial Sequence
  Description of Artificial Sequence: Synthetic peptide
WYPSSHVLF

SEQ ID NO: 268 - protein, 9 aa, Artificial Sequence
  Description of Artificial Sequence: Synthetic peptide
WFPAHHVLF

SEQ ID NO: 269 - protein, 9 aa, Artificial Sequence
  Description of Artificial Sequence: Synthetic peptide
WFPSGNVLF

SEQ ID NO: 270 - protein, 9 aa, Artificial Sequence
  Description of Artificial Sequence: Synthetic peptide
WYSSNNVLI

SEQ ID NO: 271 - protein, 9 aa, Artificial Sequence
  Description of Artificial Sequence: Synthetic peptide
WFSSRHVLF

SEQ ID NO: 272 - protein, 9 aa, Artificial Sequence
  Description of Artificial Sequence: Synthetic peptide
WYFSDHDLI

SEQ ID NO: 273 - protein, 9 aa, Artificial Sequence
  Description of Artificial Sequence: Synthetic peptide
WYSSGGVLI

SEQ ID NO: 274 - protein, 9 aa, Artificial Sequence
  Description of Artificial Sequence: Synthetic peptide
WFPSGHVLF

SEQ ID NO: 275 - protein, 9 aa, Artificial Sequence
  Description of Artificial Sequence: Synthetic peptide
WYSSTHVLF

SEQ ID NO: 276 - protein, 9 aa, Artificial Sequence
  Description of Artificial Sequence: Synthetic peptide
WYSSGSALI

SEQ ID NO: 277 - protein, 9 aa, Artificial Sequence
  Description of Artificial Sequence: Synthetic peptide
WFSPGSVLI

SEQ ID NO: 278 - protein, 9 aa, Artificial Sequence
  Description of Artificial Sequence: Synthetic peptide
WYPSAHILF

SEQ ID NO: 279 - protein, 9 aa, Artificial Sequence
  Description of Artificial Sequence: Synthetic peptide
WYGSGGILI

SEQ ID NO: 280 - protein, 9 aa, Artificial Sequence
  Description of Artificial Sequence: Synthetic peptide
WFTSGRDLF

SEQ ID NO: 281 - protein, 9 aa, Artificial Sequence
  Description of Artificial Sequence: Synthetic peptide
WYLSRNILI

SEQ ID NO: 282 - protein, 9 aa, Artificial Sequence
  Description of Artificial Sequence: Synthetic peptide
WFSGRDALF

SEQ ID NO: 283 - protein, 6 aa, Artificial Sequence
  Description of Artificial Sequence: Synthetic peptide
AFFYPI

SEQ ID NO: 284 - protein, 6 aa, Artificial Sequence
  Description of Artificial Sequence: Synthetic peptide
AFYFPI

SEQ ID NO: 285 - protein, 6 aa, Artificial Sequence
  Description of Artificial Sequence: Synthetic peptide
AHYFPI

SEQ ID NO: 286 - protein, 6 aa, Artificial Sequence
  Description of Artificial Sequence: Synthetic peptide
SHYYPI

SEQ ID NO: 287 - protein, 6 aa, Artificial Sequence
  Description of Artificial Sequence: Synthetic peptide
GFYYPI

SEQ ID NO: 288 - protein, 6 aa, Artificial Sequence
  Description of Artificial Sequence: Synthetic peptide
AFYYPI

SEQ ID NO: 289 - protein, 6 aa, Artificial Sequence
  Description of Artificial Sequence: Synthetic peptide
SFYFPI

SEQ ID NO: 290 - protein, 6 aa, Artificial Sequence
  Description of Artificial Sequence: Synthetic peptide
ADYFPI

SEQ ID NO: 291 - protein, 6 aa, Artificial Sequence
  Description of Artificial Sequence: Synthetic peptide
AFHYPI

SEQ ID NO: 292 - protein, 6 aa, Artificial Sequence
  Description of Artificial Sequence: Synthetic peptide
AYYYPI

SEQ ID NO: 293 - protein, 6 aa, Artificial Sequence
  Description of Artificial Sequence: Synthetic peptide
VFYYPI

SEQ ID NO: 294 - protein, 6 aa, Artificial Sequence
  Description of Artificial Sequence: Synthetic peptide
ANYFPI

SEQ ID NO: 295 - protein, 6 aa, Artificial Sequence
  Description of Artificial Sequence: Synthetic peptide
GFYFPI

SEQ ID NO: 296 - protein, 6 aa, Artificial Sequence
  Description of Artificial Sequence: Synthetic peptide
AYYFPI

SEQ ID NO: 297 - protein, 6 aa, Artificial Sequence
  Description of Artificial Sequence: Synthetic peptide
AFIFPI

SEQ ID NO: 298 - protein, 6 aa, Artificial Sequence
  Description of Artificial Sequence: Synthetic peptide
AFFFPI

SEQ ID NO: 299 - protein, 6 aa, Artificial Sequence
  Description of Artificial Sequence: Synthetic peptide
SFYYPI

SEQ ID NO: 300 - protein, 6 aa, Artificial Sequence
  Description of Artificial Sequence: Synthetic peptide
ALYYPI

SEQ ID NO: 301 - protein, 6 aa, Artificial Sequence
  Description of Artificial Sequence: Synthetic peptide
RFYFPI

SEQ ID NO: 302 - protein, 6 aa, Artificial Sequence
  Description of Artificial Sequence: Synthetic peptide
LYYFPI

SEQ ID NO: 303 - protein, 6 aa, Artificial Sequence
  Description of Artificial Sequence: Synthetic peptide
SSYFPI

SEQ ID NO: 304 - protein, 6 aa, Artificial Sequence
  Description of Artificial Sequence: Synthetic peptide
ASYFPI

SEQ ID NO: 305 - protein, 6 aa, Artificial Sequence
  Description of Artificial Sequence: Synthetic peptide
AHYYPI

SEQ ID NO: 306 - protein, 6 aa, Artificial Sequence
  Description of Artificial Sequence: Synthetic peptide
AGFFPI

SEQ ID NO: 307 - protein, 6 aa, Artificial Sequence
  Description of Artificial Sequence: Synthetic peptide
SSYYPI

SEQ ID NO: 308 - protein, 6 aa, Artificial Sequence
  Description of Artificial Sequence: Synthetic peptide
LIYTYI

SEQ ID NO: 309 - protein, 6 aa, Artificial Sequence
  Description of Artificial Sequence: Synthetic peptide
ITYPGM

SEQ ID NO: 310 - protein, 6 aa, Artificial Sequence
  Description of Artificial Sequence: Synthetic peptide
ISYSYM

SEQ ID NO: 311 - protein, 6 aa, Artificial Sequence
  Description of Artificial Sequence: Synthetic peptide
ISFFYM

SEQ ID NO: 312 - protein, 6 aa, Artificial Sequence
  Description of Artificial Sequence: Synthetic peptide
IPYFYM

SEQ ID NO: 313 - protein, 6 aa, Artificial Sequence
  Description of Artificial Sequence: Synthetic peptide
ISYYYI

SEQ ID NO: 314 - protein, 6 aa, Artificial Sequence
  Description of Artificial Sequence: Synthetic peptide
ISYAYM

SEQ ID NO: 315 - protein, 6 aa, Artificial Sequence
  Description of Artificial Sequence: Synthetic peptide
ITYFYM

SEQ ID NO: 316 - protein, 6 aa, Artificial Sequence
  Description of Artificial Sequence: Synthetic peptide
IYYSYI

SEQ ID NO: 317 - protein, 6 aa, Artificial Sequence
  Description of Artificial Sequence: Synthetic peptide
ILNTYM

SEQ ID NO: 318 - protein, 6 aa, Artificial Sequence
  Description of Artificial Sequence: Synthetic peptide
ISFYYI

SEQ ID NO: 319 - protein, 6 aa, Artificial Sequence
  Description of Artificial Sequence: Synthetic peptide
LAYSYM

SEQ ID NO: 320 - protein, 6 aa, Artificial Sequence
  Description of Artificial Sequence: Synthetic peptide
IRYSYI

SEQ ID NO: 321 - protein, 6 aa, Artificial Sequence
  Description of Artificial Sequence: Synthetic peptide
ITYSYM

SEQ ID NO: 322 - protein, 6 aa, Artificial Sequence
  Description of Artificial Sequence: Synthetic peptide
IINTYM

SEQ ID NO: 323 - protein, 6 aa, Artificial Sequence
  Description of Artificial Sequence: Synthetic peptide
LANSYM

SEQ ID NO: 324 - protein, 6 aa, Artificial Sequence
  Description of Artificial Sequence: Synthetic peptide
LSYTYM

SEQ ID NO: 325 - protein, 6 aa, Artificial Sequence
  Description of Artificial Sequence: Synthetic peptide
ISYSYI

SEQ ID NO: 326 - protein, 6 aa, Artificial Sequence
  Description of Artificial Sequence: Synthetic peptide
LSYLYI

SEQ ID NO: 327 - protein, 6 aa, Artificial Sequence
  Description of Artificial Sequence: Synthetic peptide
ISYAYI

SEQ ID NO: 328 - protein, 6 aa, Artificial Sequence
  Description of Artificial Sequence: Synthetic peptide
IAYSYM

SEQ ID NO: 329 - protein, 9 aa, Artificial Sequence
  Description of Artificial Sequence: Synthetic peptide
FIWESLLVS

SEQ ID NO: 330 - protein, 6 aa, Artificial Sequence
  Description of Artificial Sequence: Synthetic peptide
ISHSYM

SEQ ID NO: 331 - protein, 6 aa, Artificial Sequence
  Description of Artificial Sequence: Synthetic peptide
LRYSYI

SEQ ID NO: 332 - protein, 6 aa, Artificial Sequence
  Description of Artificial Sequence: Synthetic peptide
IRYAYM

SEQ ID NO: 333 - protein, 6 aa, Artificial Sequence
  Description of Artificial Sequence: Synthetic peptide
ITHLYM

SEQ ID NO: 334 - protein, 6 aa, Artificial Sequence
  Description of Artificial Sequence: Synthetic peptide
LSIFYM

SEQ ID NO: 335 - protein, 6 aa, Artificial Sequence
  Description of Artificial Sequence: Synthetic peptide
LSYSYI

SEQ ID NO: 336 - protein, 6 aa, Artificial Sequence
  Description of Artificial Sequence: Synthetic peptide
ISYSFM

SEQ ID NO: 337 - protein, 6 aa, Artificial Sequence
  Description of Artificial Sequence: Synthetic peptide
IAYVGI

SEQ ID NO: 338 - protein, 6 aa, Artificial Sequence
  Description of Artificial Sequence: Synthetic peptide
LSYSYM

SEQ ID NO: 339 - protein, 6 aa, Artificial Sequence
  Description of Artificial Sequence: Synthetic peptide
IAYFYI

SEQ ID NO: 340 - protein, 6 aa, Artificial Sequence
  Description of Artificial Sequence: Synthetic peptide
LSSSYM

SEQ ID NO: 341 - protein, 6 aa, Artificial Sequence
  Description of Artificial Sequence: Synthetic peptide
IYYSYM

SEQ ID NO: 342 - protein, 6 aa, Artificial Sequence
  Description of Artificial Sequence: Synthetic peptide
LHYGGI

SEQ ID NO: 343 - protein, 6 aa, Artificial Sequence
  Description of Artificial Sequence: Synthetic peptide
IGYAYM

SEQ ID NO: 344 - protein, 6 aa, Artificial Sequence
  Description of Artificial Sequence: Synthetic peptide
LSYSSI

SEQ ID NO: 345 - protein, 6 aa, Artificial Sequence
  Description of Artificial Sequence: Synthetic peptide
LSYDGI

SEQ ID NO: 346 - protein, 6 aa, Artificial Sequence
  Description of Artificial Sequence: Synthetic peptide
LSYAYM

SEQ ID NO: 347 - protein, 6 aa, Artificial Sequence
  Description of Artificial Sequence: Synthetic peptide
ISYSGI

SEQ ID NO: 348 - protein, 6 aa, Artificial Sequence
  Description of Artificial Sequence: Synthetic peptide
ISSSYM

SEQ ID NO: 349 - protein, 6 aa, Artificial Sequence
  Description of Artificial Sequence: Synthetic peptide
LSYSGM

SEQ ID NO: 350 - protein, 9 aa, Artificial Sequence
  Description of Artificial Sequence: Synthetic peptide
GFTISYFFM

SEQ ID NO: 351 - protein, 6 aa, Artificial Sequence
  Description of Artificial Sequence: Synthetic peptide
ISYSFI

SEQ ID NO: 352 - protein, 6 aa, Artificial Sequence
  Description of Artificial Sequence: Synthetic peptide
ISHAYM

SEQ ID NO: 353 - protein, 6 aa, Artificial Sequence
  Description of Artificial Sequence: Synthetic peptide
LLFFYM

SEQ ID NO: 354 - protein, 6 aa, Artificial Sequence
  Description of Artificial Sequence: Synthetic peptide
LSYFYM

SEQ ID NO: 355 - protein, 9 aa, Artificial Sequence
  Description of Artificial Sequence: Synthetic peptide
GFTLISSSI

SEQ ID NO: 356 - protein, 6 aa, Artificial Sequence
  Description of Artificial Sequence: Synthetic peptide
ITNSYM

SEQ ID NO: 357 - protein, 6 aa, Artificial Sequence
  Description of Artificial Sequence: Synthetic peptide
ISFSSI

SEQ ID NO: 358 - protein, 6 aa, Artificial Sequence
  Description of Artificial Sequence: Synthetic peptide
ISYSSM

SEQ ID NO: 359 - protein, 6 aa, Artificial Sequence
  Description of Artificial Sequence: Synthetic peptide
LSFSSM

SEQ ID NO: 360 - protein, 6 aa, Artificial Sequence
  Description of Artificial Sequence: Synthetic peptide
ISFGSI

SEQ ID NO: 361 - protein, 6 aa, Artificial Sequence
  Description of Artificial Sequence: Synthetic peptide
ITYSSI

SEQ ID NO: 362 - protein, 6 aa, Artificial Sequence
  Description of Artificial Sequence: Synthetic peptide
ISYSAI

SEQ ID NO: 363 - protein, 6 aa, Artificial Sequence
  Description of Artificial Sequence: Synthetic peptide
ISYSSI

SEQ ID NO: 364 - protein, 6 aa, Artificial Sequence
  Description of Artificial Sequence: Synthetic peptide
LSYSSM

SEQ ID NO: 365 - protein, 6 aa, Artificial Sequence
  Description of Artificial Sequence: Synthetic peptide
IAYSSM

SEQ ID NO: 366 - protein, 6 aa, Artificial Sequence
  Description of Artificial Sequence: Synthetic peptide
ISYSAM

SEQ ID NO: 367 - protein, 6 aa, Artificial Sequence
  Description of Artificial Sequence: Synthetic peptide
ISYGVI

SEQ ID NO: 368 - protein, 6 aa, Artificial Sequence
  Description of Artificial Sequence: Synthetic peptide
IPYGSM

SEQ ID NO: 369 - protein, 6 aa, Artificial Sequence
  Description of Artificial Sequence: Synthetic peptide
IAYSAM

SEQ ID NO: 370 - protein, 6 aa, Artificial Sequence
  Description of Artificial Sequence: Synthetic peptide
LSFSSI

SEQ ID NO: 371 - protein, 6 aa, Artificial Sequence
  Description of Artificial Sequence: Synthetic peptide
LTYSSI

SEQ ID NO: 372 - protein, 6 aa, Artificial Sequence
  Description of Artificial Sequence: Synthetic peptide
LSYGSI

SEQ ID NO: 373 - protein, 6 aa, Artificial Sequence
  Description of Artificial Sequence: Synthetic peptide
ITYSSM

SEQ ID NO: 374 - protein, 6 aa, Artificial Sequence
  Description of Artificial Sequence: Synthetic peptide
LGYGSM

SEQ ID NO: 375 - protein, 6 aa, Artificial Sequence
  Description of Artificial Sequence: Synthetic peptide
IGYSSI

SEQ ID NO: 376 - protein, 6 aa, Artificial Sequence
  Description of Artificial Sequence: Synthetic peptide
ITYGSI

SEQ ID NO: 377 - protein, 6 aa, Artificial Sequence
  Description of Artificial Sequence: Synthetic peptide
ISYGSM

SEQ ID NO: 378 - protein, 6 aa, Artificial Sequence
  Description of Artificial Sequence: Synthetic peptide
IYYSSM

SEQ ID NO: 379 - protein, 6 aa, Artificial Sequence
  Description of Artificial Sequence: Synthetic peptide
IFYSSM

SEQ ID NO: 380 - protein, 6 aa, Artificial Sequence
  Description of Artificial Sequence: Synthetic peptide
ISFSSM

SEQ ID NO: 381 - protein, 10 aa, Artificial Sequence
  Description of Artificial Sequence: Synthetic peptide
TIYPASSSTS

SEQ ID NO: 382 - protein, 10 aa, Artificial Sequence
  Description of Artificial Sequence: Synthetic peptide
TIFSSHGSTS

SEQ ID NO: 383 - protein, 10 aa, Artificial Sequence
  Description of Artificial Sequence: Synthetic peptide
SIYSSSSSTS

SEQ ID NO: 384 - protein, 10 aa, Artificial Sequence
  Description of Artificial Sequence: Synthetic peptide
TIDSSTGSTT

SEQ ID NO: 385 - protein, 10 aa, Artificial Sequence
  Description of Artificial Sequence: Synthetic peptide
SIYSSSGSTS

SEQ ID NO: 386 - protein, 10 aa, Artificial Sequence
  Description of Artificial Sequence: Synthetic peptide
SIYPSSSSTT

SEQ ID NO: 387 - protein, 10 aa, Artificial Sequence
  Description of Artificial Sequence: Synthetic peptide
SIYPSSSSTA

SEQ ID NO: 388 - protein, 10 aa, Artificial Sequence
  Description of Artificial Sequence: Synthetic peptide
SIYPSFGSTS

SEQ ID NO: 389 - protein, 10 aa, Artificial Sequence
  Description of Artificial Sequence: Synthetic peptide
SIYSSNGGTS

SEQ ID NO: 390 - protein, 10 aa, Artificial Sequence
  Description of Artificial Sequence: Synthetic peptide
SIYPASSSTS

SEQ ID NO: 391 - protein, 10 aa, Artificial Sequence
  Description of Artificial Sequence: Synthetic peptide
SIYPSSGDTS

SEQ ID NO: 392 - protein, 10 aa, Artificial Sequence
  Description of Artificial Sequence: Synthetic peptide
AIYSSSSSTS

SEQ ID NO: 393 - protein, 10 aa, Artificial Sequence
  Description of Artificial Sequence: Synthetic peptide
TIYPSSGSTA

SEQ ID NO: 394 - protein, 10 aa, Artificial Sequence
  Description of Artificial Sequence: Synthetic peptide
SIYSAPSSTA

SEQ ID NO: 395 - protein, 10 aa, Artificial Sequence
  Description of Artificial Sequence: Synthetic peptide
TIYSSSGSTS

SEQ ID NO: 396 - protein, 10 aa, Artificial Sequence
  Description of Artificial Sequence: Synthetic peptide
SIDPSSGSTS

SEQ ID NO: 397 - protein, 10 aa, Artificial Sequence
  Description of Artificial Sequence: Synthetic peptide
TIYPSSGSTG

SEQ ID NO: 398 - protein, 10 aa, Artificial Sequence
  Description of Artificial Sequence: Synthetic peptide
SIYPSSSSTS

SEQ ID NO: 399 - protein, 10 aa, Artificial Sequence
  Description of Artificial Sequence: Synthetic peptide
SIYSSPSSTS

SEQ ID NO: 400 - protein, 10 aa, Artificial Sequence
  Description of Artificial Sequence: Synthetic peptide
SIDSSSGSTS

SEQ ID NO: 401 - protein, 10 aa, Artificial Sequence
  Description of Artificial Sequence: Synthetic peptide
TIYSASGSTT

SEQ ID NO: 402 - protein, 10 aa, Artificial Sequence
  Description of Artificial Sequence: Synthetic peptide
SISPSDSSTS

SEQ ID NO: 403 - protein, 10 aa, Artificial Sequence
  Description of Artificial Sequence: Synthetic peptide
SIDPSSGLTS

SEQ ID NO: 404 - protein, 10 aa, Artificial Sequence
  Description of Artificial Sequence: Synthetic peptide
TIDSFSGSTS

SEQ ID NO: 405 - protein, 10 aa, Artificial Sequence
  Description of Artificial Sequence: Synthetic peptide
SIYPSSGSTS

SEQ ID NO: 406 - protein, 10 aa, Artificial Sequence
  Description of Artificial Sequence: Synthetic peptide
TIYPSSSSTS

SEQ ID NO: 407 - protein, 10 aa, Artificial Sequence
  Description of Artificial Sequence: Synthetic peptide
AIYPSPSSTS

SEQ ID NO: 408 - protein, 10 aa, Artificial Sequence
  Description of Artificial Sequence: Synthetic peptide
SIYSTSGSTS

SEQ ID NO: 409 - protein, 10 aa, Artificial Sequence
  Description of Artificial Sequence: Synthetic peptide
AITPSSSNTS

SEQ ID NO: 410 - protein, 10 aa, Artificial Sequence
  Description of Artificial Sequence: Synthetic peptide
SIDPSSSSTA

SEQ ID NO: 411 - protein, 10 aa, Artificial Sequence
  Description of Artificial Sequence: Synthetic peptide
SIYSRSGSTA

SEQ ID NO: 412 - protein, 10 aa, Artificial Sequence
  Description of Artificial Sequence: Synthetic peptide
TIDPSSGSTS

SEQ ID NO: 413 - protein, 10 aa, Artificial Sequence
  Description of Artificial Sequence: Synthetic peptide
SIGPSSGSTS

SEQ ID NO: 414 - protein, 10 aa, Artificial Sequence
  Description of Artificial Sequence: Synthetic peptide
SIDPSSSSTS

SEQ ID NO: 415 - protein, 10 aa, Artificial Sequence
  Description of Artificial Sequence: Synthetic peptide
SIYPSPSSTS

SEQ ID NO: 416 - protein, 10 aa, Artificial Sequence
  Description of Artificial Sequence: Synthetic peptide
SISSSFSSTS

SEQ ID NO: 417 - protein, 10 aa, Artificial Sequence
  Description of Artificial Sequence: Synthetic peptide
TIYSSSSSTA

SEQ ID NO: 418 - protein, 10 aa, Artificial Sequence
  Description of Artificial Sequence: Synthetic peptide
SIYSSPGSTA

SEQ ID NO: 419 - protein, 10 aa, Artificial Sequence
  Description of Artificial Sequence: Synthetic peptide
SICPFCSSTS

SEQ ID NO: 420 - protein, 10 aa, Artificial Sequence
  Description of Artificial Sequence: Synthetic peptide
SIHPFDGSTS

SEQ ID NO: 421 - protein, 10 aa, Artificial Sequence
  Description of Artificial Sequence: Synthetic peptide
SISSSSGSTA

SEQ ID NO: 422 - protein, 10 aa, Artificial Sequence
  Description of Artificial Sequence: Synthetic peptide
TIDPYAGSTS

SEQ ID NO: 423 - protein, 10 aa, Artificial Sequence
  Description of Artificial Sequence: Synthetic peptide
SIYPSSGSTA

SEQ ID NO: 424 - protein, 10 aa, Artificial Sequence
  Description of Artificial Sequence: Synthetic peptide
SIYPSDSSTS

SEQ ID NO: 425 - protein, 10 aa, Artificial Sequence
  Description of Artificial Sequence: Synthetic peptide
SIYPSSGHTS

SEQ ID NO: 426 - protein, 10 aa, Artificial Sequence
  Description of Artificial Sequence: Synthetic peptide
SIYSSPGSTS

SEQ ID NO: 427 - protein, 10 aa, Artificial Sequence
  Description of Artificial Sequence: Synthetic peptide
SIDPSSGFTS

SEQ ID NO: 428 - protein, 10 aa, Artificial Sequence
  Description of Artificial Sequence: Synthetic peptide
SIFSSSSSTS

SEQ ID NO: 429 - protein, 10 aa, Artificial Sequence
  Description of Artificial Sequence: Synthetic peptide
SIYPAPSSTP

SEQ ID NO: 430 - protein, 10 aa, Artificial Sequence
  Description of Artificial Sequence: Synthetic peptide
SIYPSYGSSF

SEQ ID NO: 431 - protein, 10 aa, Artificial Sequence
  Description of Artificial Sequence: Synthetic peptide
TIYPYYSSTL

SEQ ID NO: 432 - protein, 10 aa, Artificial Sequence
  Description of Artificial Sequence: Synthetic peptide
SIYSSYSSTY

SEQ ID NO: 433 - protein, 10 aa, Artificial Sequence
  Description of Artificial Sequence: Synthetic peptide
SIYPSYSVTY

SEQ ID NO: 434 - protein, 10 aa, Artificial Sequence
  Description of Artificial Sequence: Synthetic peptide
SIYPYYGSTF

SEQ ID NO: 435 - protein, 10 aa, Artificial Sequence
  Description of Artificial Sequence: Synthetic peptide
SIYPSYSSTF

SEQ ID NO: 436 - protein, 10 aa, Artificial Sequence
  Description of Artificial Sequence: Synthetic peptide
SIYPAYSSTY

SEQ ID NO: 437 - protein, 10 aa, Artificial Sequence
  Description of Artificial Sequence: Synthetic peptide
SIYSSYSSTF

SEQ ID NO: 438 - protein, 10 aa, Artificial Sequence
  Description of Artificial Sequence: Synthetic peptide
SIYSSYGSTY

SEQ ID NO: 439 - protein, 10 aa, Artificial Sequence
  Description of Artificial Sequence: Synthetic peptide
SIYPSYSSTY

SEQ ID NO: 440 - protein, 10 aa, Artificial Sequence
  Description of Artificial Sequence: Synthetic peptide
SIYSYYGSTY

SEQ ID NO: 441 - protein, 10 aa, Artificial Sequence
  Description of Artificial Sequence: Synthetic peptide
TIYSLFGATF

SEQ ID NO: 442 - protein, 10 aa, Artificial Sequence
  Description of Artificial Sequence: Synthetic peptide
SIYPAYGATF

SEQ ID NO: 443 - protein, 10 aa, Artificial Sequence
  Description of Artificial Sequence: Synthetic peptide
SIYPYYSSTY

SEQ ID NO: 444 - protein, 10 aa, Artificial Sequence
  Description of Artificial Sequence: Synthetic peptide
SIYPSFGSTY

SEQ ID NO: 445 - protein, 10 aa, Artificial Sequence
  Description of Artificial Sequence: Synthetic peptide
SIYPSFSPTY

SEQ ID NO: 446 - protein, 10 aa, Artificial Sequence
  Description of Artificial Sequence: Synthetic peptide
SIYSSYGSTF

SEQ ID NO: 447 - protein, 10 aa, Artificial Sequence
  Description of Artificial Sequence: Synthetic peptide
SIYPAYSPTY

SEQ ID NO: 448 - protein, 10 aa, Artificial Sequence
  Description of Artificial Sequence: Synthetic peptide
SIYSAYSSTF

SEQ ID NO: 449 - protein, 10 aa, Artificial Sequence
  Description of Artificial Sequence: Synthetic peptide
TIYPYYDPTY

SEQ ID NO: 450 - protein, 10 aa, Artificial Sequence
  Description of Artificial Sequence: Synthetic peptide
SIYPSYGSTY

SEQ ID NO: 451 - protein, 10 aa, Artificial Sequence
  Description of Artificial Sequence: Synthetic peptide
SIYPHYGATF

SEQ ID NO: 452 - protein, 10 aa, Artificial Sequence
  Description of Artificial Sequence: Synthetic peptide
SIYPSYGSTF

SEQ ID NO: 453 - protein, 10 aa, Artificial Sequence
  Description of Artificial Sequence: Synthetic peptide
SIYSSYSATY

SEQ ID NO: 454 - protein, 10 aa, Artificial Sequence
  Description of Artificial Sequence: Synthetic peptide
SIYPYYGPTY

SEQ ID NO: 455 - protein, 10 aa, Artificial Sequence
  Description of Artificial Sequence: Synthetic peptide
SIYPFYGSTF

SEQ ID NO: 456 - protein, 10 aa, Artificial Sequence
  Description of Artificial Sequence: Synthetic peptide
AIYPSYSSTN

SEQ ID NO: 457 - protein, 10 aa, Artificial Sequence
  Description of Artificial Sequence: Synthetic peptide
SIYPYYSSTH

SEQ ID NO: 458 - protein, 10 aa, Artificial Sequence
  Description of Artificial Sequence: Synthetic peptide
SIYPSYSTTY

SEQ ID NO: 459 - protein, 10 aa, Artificial Sequence
  Description of Artificial Sequence: Synthetic peptide
SIYSNYSSSY

SEQ ID NO: 460 - protein, 10 aa, Artificial Sequence
  Description of Artificial Sequence: Synthetic peptide
TIYPSYGSTY

SEQ ID NO: 461 - protein, 10 aa, Artificial Sequence
  Description of Artificial Sequence: Synthetic peptide
SIYPSFGSTF

SEQ ID NO: 462 - protein, 10 aa, Artificial Sequence
  Description of Artificial Sequence: Synthetic peptide
TIYPSYSSTY

SEQ ID NO: 463 - protein, 10 aa, Artificial Sequence
  Description of Artificial Sequence: Synthetic peptide
TIYSSYGATS

SEQ ID NO: 464 - protein, 10 aa, Artificial Sequence
  Description of Artificial Sequence: Synthetic peptide
SIYPSYSSTI

SEQ ID NO: 465 - protein, 10 aa, Artificial Sequence
  Description of Artificial Sequence: Synthetic peptide
TIYPYYGATY

SEQ ID NO: 466 - protein, 10 aa, Artificial Sequence
  Description of Artificial Sequence: Synthetic peptide
SIYSGYSATY

SEQ ID NO: 467 - protein, 10 aa, Artificial Sequence
  Description of Artificial Sequence: Synthetic peptide
SIYPSYSATF

SEQ ID NO: 468 - protein, 10 aa, Artificial Sequence
  Description of Artificial Sequence: Synthetic peptide
TIYPSYSSTF

SEQ ID NO: 469 - protein, 10 aa, Artificial Sequence
  Description of Artificial Sequence: Synthetic peptide
AIYSSYGSTY

SEQ ID NO: 470 - protein, 10 aa, Artificial Sequence
  Description of Artificial Sequence: Synthetic peptide
SIFPYYGSTY

SEQ ID NO: 471 - protein, 10 aa, Artificial Sequence
  Description of Artificial Sequence: Synthetic peptide
SIYPFYSTTF

SEQ ID NO: 472 - protein, 10 aa, Artificial Sequence
  Description of Artificial Sequence: Synthetic peptide
SIYPSYGSTS

SEQ ID NO: 473 - protein, 10 aa, Artificial Sequence
  Description of Artificial Sequence: Synthetic peptide
SIYPTYGSTV

SEQ ID NO: 474 - protein, 10 aa, Artificial Sequence
  Description of Artificial Sequence: Synthetic peptide
TIYPNYSSTY

SEQ ID NO: 475 - protein, 10 aa, Artificial Sequence
  Description of Artificial Sequence: Synthetic peptide
SIYPSYSATY

SEQ ID NO: 476 - protein, 10 aa, Artificial Sequence
  Description of Artificial Sequence: Synthetic peptide
SIYPGYSSTY

SEQ ID NO: 477 - protein, 10 aa, Artificial Sequence
  Description of Artificial Sequence: Synthetic peptide
SIYPSYSSTS

SEQ ID NO: 478 - protein, 10 aa, Artificial Sequence
  Description of Artificial Sequence: Synthetic peptide
SIYSGYGSTY

SEQ ID NO: 479 - protein, 10 aa, Artificial Sequence
  Description of Artificial Sequence: Synthetic peptide
SIYPSYGSTN

SEQ ID NO: 480 - protein, 10 aa, Artificial Sequence
  Description of Artificial Sequence: Synthetic peptide
SIYPTYGSAY

SEQ ID NO: 481 - protein, 10 aa, Artificial Sequence
  Description of Artificial Sequence: Synthetic peptide
TIYSSYGSTY

SEQ ID NO: 482 - protein, 10 aa, Artificial Sequence
  Description of Artificial Sequence: Synthetic peptide
AIYPYYGSTY

SEQ ID NO: 483 - protein, 4 aa, Artificial Sequence
  Description of Artificial Sequence: Synthetic peptide
YYAF

SEQ ID NO: 484 - protein, 4 aa, Artificial Sequence
  Description of Artificial Sequence: Synthetic peptide
YYAM

SEQ ID NO: 485 - protein, 4 aa, Artificial Sequence
  Description of Artificial Sequence: Synthetic peptide
YYGM

SEQ ID NO: 486 - protein, 4 aa, Artificial Sequence
  Description of Artificial Sequence: Synthetic peptide
YYGF

SEQ ID NO: 487 - protein, 4 aa, Artificial Sequence
  Description of Artificial Sequence: Synthetic peptide
YYAL

SEQ ID NO: 488 - protein, 4 aa, Artificial Sequence
  Description of Artificial Sequence: Synthetic peptide
FYAF

SEQ ID NO: 489 - protein, 4 aa, Artificial Sequence
  Description of Artificial Sequence: Synthetic peptide
YYAI

SEQ ID NO: 490 - protein, 4 aa, Artificial Sequence
  Description of Artificial Sequence: Synthetic peptide
YFAL

SEQ ID NO: 491 - protein, 7 aa, Artificial Sequence
  Description of Artificial Sequence: Synthetic peptide
SASDLYS

SEQ ID NO: 492 - protein, 6 aa, Artificial Sequence
  Description of Artificial Sequence: Synthetic peptide
ASYAPI

SEQ ID NO: 493 - protein, 8 aa, Artificial Sequence
  Description of Artificial Sequence: Synthetic peptide
YWAYYSPI

SEQ ID NO: 494 - protein, 7 aa, Artificial Sequence
  Description of Artificial Sequence: Synthetic peptide
SSSGHLI

SEQ ID NO: 495 - protein, 6 aa, Artificial Sequence
  Description of Artificial Sequence: Synthetic peptide
PYGYPI

SEQ ID NO: 496 - protein, 5 aa, Artificial Sequence
  Description of Artificial Sequence: Synthetic peptide
FHGLI

SEQ ID NO: 497 - protein, 5 aa, Artificial Sequence
  Description of Artificial Sequence: Synthetic peptide
YWFLI

SEQ ID NO: 498 - protein, 7 aa, Artificial Sequence
  Description of Artificial Sequence: Synthetic peptide
HSYGYPI

SEQ ID NO: 499 - protein, 7 aa, Artificial Sequence
  Description of Artificial Sequence: Synthetic peptide
YYAWYLI

SEQ ID NO: 500 - protein, 6 aa, Artificial Sequence
  Description of Artificial Sequence: Synthetic peptide
AAYSPI

SEQ ID NO: 501 - protein, 8 aa, Artificial Sequence
  Description of Artificial Sequence: Synthetic peptide
YYSWYPPF

SEQ ID NO: 502 - protein, 5 aa, Artificial Sequence
  Description of Artificial Sequence: Synthetic peptide
SFYPI

SEQ ID NO: 503 - protein, 6 aa, Artificial Sequence
  Description of Artificial Sequence: Synthetic peptide
YYWYPF

SEQ ID NO: 504 - protein, 5 aa, Artificial Sequence
  Description of Artificial Sequence: Synthetic peptide
WGSPI

SEQ ID NO: 505 - protein, 7 aa, Artificial Sequence
  Description of Artificial Sequence: Synthetic peptide
YSSWYLI

SEQ ID NO: 506 - protein, 5 aa, Artificial Sequence
  Description of Artificial Sequence: Synthetic peptide
GAYLI

SEQ ID NO: 507 - protein, 7 aa, Artificial Sequence
  Description of Artificial Sequence: Synthetic peptide
HFYYYPI

SEQ ID NO: 508 - protein, 6 aa, Artificial Sequence
  Description of Artificial Sequence: Synthetic peptide
AFHSPI

SEQ ID NO: 509 - protein, 5 aa, Artificial Sequence
  Description of Artificial Sequence: Synthetic peptide
AWYPI

SEQ ID NO: 510 - protein, 7 aa, Artificial Sequence
  Description of Artificial Sequence: Synthetic peptide
YAGAGLI

SEQ ID NO: 511 - protein, 6 aa, Artificial Sequence
  Description of Artificial Sequence: Synthetic peptide
SYSYPI

SEQ ID NO: 512 - protein, 7 aa, Artificial Sequence
  Description of Artificial Sequence: Synthetic peptide
YYRSRLI

SEQ ID NO: 513 - protein, 6 aa, Artificial Sequence
  Description of Artificial Sequence: Synthetic peptide
SYFYPI

SEQ ID NO: 514 - protein, 5 aa, Artificial Sequence
  Description of Artificial Sequence: Synthetic peptide
GFFPI

SEQ ID NO: 515 - protein, 6 aa, Artificial Sequence
  Description of Artificial Sequence: Synthetic peptide
SHSYPI

SEQ ID NO: 516 - protein, 6 aa, Artificial Sequence
  Description of Artificial Sequence: Synthetic peptide
RGSGPI

SEQ ID NO: 517 - protein, 7 aa, Artificial Sequence
  Description of Artificial Sequence: Synthetic peptide
RYSGGLI

SEQ ID NO: 518 - protein, 8 aa, Artificial Sequence
  Description of Artificial Sequence: Synthetic peptide
SARYYYLI

SEQ ID NO: 519 - protein, 8 aa, Artificial Sequence
  Description of Artificial Sequence: Synthetic peptide
SYRGYYLI

SEQ ID NO: 520 - protein, 6 aa, Artificial Sequence
  Description of Artificial Sequence: Synthetic peptide
FSWGLI

SEQ ID NO: 521 - protein, 6 aa, Artificial Sequence
  Description of Artificial Sequence: Synthetic peptide
YSWLPI

SEQ ID NO: 522 - protein, 5 aa, Artificial Sequence
  Description of Artificial Sequence: Synthetic peptide
FFRPI

SEQ ID NO: 523 - protein, 6 aa, Artificial Sequence
  Description of Artificial Sequence: Synthetic peptide
YSRRLF

SEQ ID NO: 524 - protein, 6 aa, Artificial Sequence
  Description of Artificial Sequence: Synthetic peptide
FIRVPI

SEQ ID NO: 525 - protein, 5 aa, Artificial Sequence
  Description of Artificial Sequence: Synthetic peptide
FYVPF

SEQ ID NO: 526 - protein, 6 aa, Artificial Sequence
  Description of Artificial Sequence: Synthetic peptide
GYSFGQ

SEQ ID NO: 527 - protein, 6 aa, Artificial Sequence
  Description of Artificial Sequence: Synthetic peptide
LSYYYM

SEQ ID NO: 528 - protein, 6 aa, Artificial Sequence
  Description of Artificial Sequence: Synthetic peptide
FSSSSI

SEQ ID NO: 529 - protein, 6 aa, Artificial Sequence
  Description of Artificial Sequence: Synthetic peptide
LYYYSM

SEQ ID NO: 530 - protein, 6 aa, Artificial Sequence
  Description of Artificial Sequence: Synthetic peptide
IYYYSM

SEQ ID NO: 531 - protein, 6 aa, Artificial Sequence
  Description of Artificial Sequence: Synthetic peptide
LYYYYI

SEQ ID NO: 532 - protein, 6 aa, Artificial Sequence
  Description of Artificial Sequence: Synthetic peptide
ISYYSM

SEQ ID NO: 533 - protein, 6 aa, Artificial Sequence
  Description of Artificial Sequence: Synthetic peptide
LSYYYI

SEQ ID NO: 534 - protein, 6 aa, Artificial Sequence
  Description of Artificial Sequence: Synthetic peptide
LYYSSM

SEQ ID NO: 535 - protein, 6 aa, Artificial Sequence
  Description of Artificial Sequence: Synthetic peptide
IYSSYI

SEQ ID NO: 536 - protein, 6 aa, Artificial Sequence
  Description of Artificial Sequence: Synthetic peptide
FTAYAM

SEQ ID NO: 537 - protein, 6 aa, Artificial Sequence
  Description of Artificial Sequence: Synthetic peptide
LGGYGI

SEQ ID NO: 538 - protein, 6 aa, Artificial Sequence
  Description of Artificial Sequence: Synthetic peptide
FASAWM

SEQ ID NO: 539 - protein, 6 aa, Artificial Sequence
  Description of Artificial Sequence: Synthetic peptide
IGGAAM

SEQ ID NO: 540 - protein, 6 aa, Artificial Sequence
  Description of Artificial Sequence: Synthetic peptide
FASYGM

SEQ ID NO: 541 - protein, 6 aa, Artificial Sequence
  Description of Artificial Sequence: Synthetic peptide
IAGSSI

SEQ ID NO: 542 - protein, 6 aa, Artificial Sequence
  Description of Artificial Sequence: Synthetic peptide
LTGDWM

SEQ ID NO: 543 - protein, 6 aa, Artificial Sequence
  Description of Artificial Sequence: Synthetic peptide
FTSYSM

SEQ ID NO: 544 - protein, 6 aa, Artificial Sequence
  Description of Artificial Sequence: Synthetic peptide
LNAAAM

SEQ ID NO: 545 - protein, 6 aa, Artificial Sequence
  Description of Artificial Sequence: Synthetic peptide
LAGAGM

SEQ ID NO: 546 - protein, 6 aa, Artificial Sequence
  Description of Artificial Sequence: Synthetic peptide
ISYYPM

SEQ ID NO: 547 - protein, 6 aa, Artificial Sequence
  Description of Artificial Sequence: Synthetic peptide
IVFGSI

SEQ ID NO: 548 - protein, 6 aa, Artificial Sequence
  Description of Artificial Sequence: Synthetic peptide
ISSNYI

SEQ ID NO: 549 - protein, 6 aa, Artificial Sequence
  Description of Artificial Sequence: Synthetic peptide
LTYTSM

SEQ ID NO: 550 - protein, 6 aa, Artificial Sequence
  Description of Artificial Sequence: Synthetic peptide
ITYYSM

SEQ ID NO: 551 - protein, 6 aa, Artificial Sequence
  Description of Artificial Sequence: Synthetic peptide
IADSSI

SEQ ID NO: 552 - protein, 10 aa, Artificial Sequence
  Description of Artificial Sequence: Synthetic peptide
SIYSSYGYTY

SEQ ID NO: 553 - protein, 10 aa, Artificial Sequence
  Description of Artificial Sequence: Synthetic peptide
SISSSYGYTY

SEQ ID NO: 554 - protein, 10 aa, Artificial Sequence
  Description of Artificial Sequence: Synthetic peptide
YISSYYSYTS

SEQ ID NO: 555 - protein, 10 aa, Artificial Sequence
  Description of Artificial Sequence: Synthetic peptide
SISSYYGYTS

SEQ ID NO: 556 - protein, 10 aa, Artificial Sequence
  Description of Artificial Sequence: Synthetic peptide
SIYSYSSYTS

SEQ ID NO: 557 - protein, 10 aa, Artificial Sequence
  Description of Artificial Sequence: Synthetic peptide
SISPYYGYTS

SEQ ID NO: 558 - protein, 10 aa, Artificial Sequence
  Description of Artificial Sequence: Synthetic peptide
SIYPSYGYTY

SEQ ID NO: 559 - protein, 10 aa, Artificial Sequence
  Description of Artificial Sequence: Synthetic peptide
SIYSYYSYTS

SEQ ID NO: 560 - protein, 10 aa, Artificial Sequence
  Description of Artificial Sequence: Synthetic peptide
SIYPYYGYTS

SEQ ID NO: 561 - protein, 10 aa, Artificial Sequence
  Description of Artificial Sequence: Synthetic peptide
SIYSYYSSTY

SEQ ID NO: 562 - protein, 10 aa, Artificial Sequence
  Description of Artificial Sequence: Synthetic peptide
SIYPSSGSTY

SEQ ID NO: 563 - protein, 10 aa, Artificial Sequence
  Description of Artificial Sequence: Synthetic peptide
YIYSYYGYTY

SEQ ID NO: 564 - protein, 10 aa, Artificial Sequence
  Description of Artificial Sequence: Synthetic peptide
YIYPYYGYTS

SEQ ID NO: 565 - protein, 10 aa, Artificial Sequence
  Description of Artificial Sequence: Synthetic peptide
SIYPYYGSTY

SEQ ID NO: 566 - protein, 10 aa, Artificial Sequence
  Description of Artificial Sequence: Synthetic peptide
SIYPSGGYTA

SEQ ID NO: 567 - protein, 10 aa, Artificial Sequence
  Description of Artificial Sequence: Synthetic peptide
GIYPSGGYTA

SEQ ID NO: 568 - protein, 10 aa, Artificial Sequence
  Description of Artificial Sequence: Synthetic peptide
RISPSGGYTA

SEQ ID NO: 569 - protein, 10 aa, Artificial Sequence
  Description of Artificial Sequence: Synthetic peptide
GISASGGATA

SEQ ID NO: 570 - protein, 10 aa, Artificial Sequence
  Description of Artificial Sequence: Synthetic peptide
GISTSGGATA

SEQ ID NO: 571 - protein, 10 aa, Artificial Sequence
  Description of Artificial Sequence: Synthetic peptide
GISASGGYTA

SEQ ID NO: 572 - protein, 10 aa, Artificial Sequence
  Description of Artificial Sequence: Synthetic peptide
GIYPSGGATA

SEQ ID NO: 573 - protein, 10 aa, Artificial Sequence
  Description of Artificial Sequence: Synthetic peptide
GIYPSGGSTA

SEQ ID NO: 574 - protein, 10 aa, Artificial Sequence
  Description of Artificial Sequence: Synthetic peptide
GISASRGATA

SEQ ID NO: 575 - protein, 10 aa, Artificial Sequence
  Description of Artificial Sequence: Synthetic peptide
RISTSGGYTA

SEQ ID NO: 576 - protein, 10 aa, Artificial Sequence
  Description of Artificial Sequence: Synthetic peptide
GIYASGGATA

SEQ ID NO: 577 - protein, 10 aa, Artificial Sequence
  Description of Artificial Sequence: Synthetic peptide
YISPYSGYTF

SEQ ID NO: 578 - protein, 10 aa, Artificial Sequence
  Description of Artificial Sequence: Synthetic peptide
HIAPYYGFTY

SEQ ID NO: 579 - protein, 10 aa, Artificial Sequence
  Description of Artificial Sequence: Synthetic peptide
SINPSYSYTF

SEQ ID NO: 580 - protein, 10 aa, Artificial Sequence
  Description of Artificial Sequence: Synthetic peptide
SISPFHGHTF

SEQ ID NO: 581 - protein, 10 aa, Artificial Sequence
  Description of Artificial Sequence: Synthetic peptide
SITSYYGNTD

SEQ ID NO: 582 - protein, 10 aa, Artificial Sequence
  Description of Artificial Sequence: Synthetic peptide
SIYPYYGFTD

SEQ ID NO: 583 - protein, 10 aa, Artificial Sequence
  Description of Artificial Sequence: Synthetic peptide
SISPYFSYTR

SEQ ID NO: 584 - protein, 11 aa, Artificial Sequence
  Description of Artificial Sequence: Synthetic peptide
WSHVSGHYSGM

SEQ ID NO: 585 - protein, 18 aa, Artificial Sequence
  Description of Artificial Sequence: Synthetic peptide
GGSGVSHYGSVYYSWWAL

SEQ ID NO: 586 - protein, 4 aa, Artificial Sequence
  Description of Artificial Sequence: Synthetic peptide
SWAM

SEQ ID NO: 587 - protein, 13 aa, Artificial Sequence
  Description of Artificial Sequence: Synthetic peptide
WSHVVGAHYGWAI

SEQ ID NO: 588 - protein, 13 aa, Artificial Sequence
  Description of Artificial Sequence: Synthetic peptide
SWWYWSYHGYAAM

SEQ ID NO: 589 - protein, 17 aa, Artificial Sequence
  Description of Artificial Sequence: Synthetic peptide
GYSYVWYGVYYHGYGAM

SEQ ID NO: 590 - protein, 8 aa, Artificial Sequence
  Description of Artificial Sequence: Synthetic peptide
SGYGWYAM

SEQ ID NO: 591 - protein, 10 aa, Artificial Sequence
  Description of Artificial Sequence: Synthetic peptide
SYYWGYWAAL

SEQ ID NO: 592 - protein, 16 aa, Artificial Sequence
  Description of Artificial Sequence: Synthetic peptide
GGVYYYPSYAGWPYGM

SEQ ID NO: 593 - protein, 9 aa, Artificial Sequence
  Description of Artificial Sequence: Synthetic peptide
HYAWWVGAF

SEQ ID NO: 594 - protein, 11 aa, Artificial Sequence
  Description of Artificial Sequence: Synthetic peptide
GGGAHGWGYSL

SEQ ID NO: 595 - protein, 18 aa, Artificial Sequence
  Description of Artificial Sequence: Synthetic peptide
SGPVYASYSWAWYYYGAL

SEQ ID NO: 596 - protein, 11 aa, Artificial Sequence
  Description of Artificial Sequence: Synthetic peptide
YSWGAYGYGAM

SEQ ID NO: 597 - protein, 13 aa, Artificial Sequence
  Description of Artificial Sequence: Synthetic peptide
YYYHYSVPVYAAL

SEQ ID NO: 598 - protein, 19 aa, Artificial Sequence
  Description of Artificial Sequence: Synthetic peptide
SPYYGFYYSGFYHWVFYGF

SEQ ID NO: 599 - protein, 9 aa, Artificial Sequence
  Description of Artificial Sequence: Synthetic peptide
AAWGWHPAF

SEQ ID NO: 600 - protein, 19 aa, Artificial Sequence
  Description of Artificial Sequence: Synthetic peptide
GGGFYYAGGWPYASYAWAF

SEQ ID NO: 601 - protein, 9 aa, Artificial Sequence
  Description of Artificial Sequence: Synthetic peptide
AWYSYYVGL

SEQ ID NO: 602 - protein, 18 aa, Artificial Sequence
  Description of Artificial Sequence: Synthetic peptide
GVYYGGGYWAGGYYPAAL

SEQ ID NO: 603 - protein, 7 aa, Artificial Sequence
  Description of Artificial Sequence: Synthetic peptide
RSYYFAL

SEQ ID NO: 604 - protein, 14 aa, Artificial Sequence
  Description of Artificial Sequence: Synthetic peptide
SSTYSSYYYHFYAL

SEQ ID NO: 605 - protein, 16 aa, Artificial Sequence
  Description of Artificial Sequence: Synthetic peptide
STRWHSAYAYYYSHAM

SEQ ID NO: 606 - protein, 14 aa, Artificial Sequence
  Description of Artificial Sequence: Synthetic peptide
SRPSWYWSYHYFAL

SEQ ID NO: 607 - protein, 9 aa, Artificial Sequence
  Description of Artificial Sequence: Synthetic peptide
SYYGYSRGF

SEQ ID NO: 608 - protein, 16 aa, Artificial Sequence
  Description of Artificial Sequence: Synthetic peptide
SYSFHYAWPRYHYGAL

SEQ ID NO: 609 - protein, 15 aa, Artificial Sequence
  Description of Artificial Sequence: Synthetic peptide
YDSGYYAWYYHDRAM

SEQ ID NO: 610 - protein, 8 aa, Artificial Sequence
  Description of Artificial Sequence: Synthetic peptide
FGSPHYGM

SEQ ID NO: 611 - protein, 11 aa, Artificial Sequence
  Description of Artificial Sequence: Synthetic peptide
PRYYAYYSGGF

SEQ ID NO: 612 - protein, 11 aa, Artificial Sequence
  Description of Artificial Sequence: Synthetic peptide
SHSSGSRSRGL

SEQ ID NO: 613 - protein, 10 aa, Artificial Sequence
  Description of Artificial Sequence: Synthetic peptide
YSFRYPSYAM

SEQ ID NO: 614 - protein, 7 aa, Artificial Sequence
  Description of Artificial Sequence: Synthetic peptide
GSRYSGF

SEQ ID NO: 615 - protein, 10 aa, Artificial Sequence
  Description of Artificial Sequence: Synthetic peptide
HYYFRWSRGM

SEQ ID NO: 616 - protein, 10 aa, Artificial Sequence
  Description of Artificial Sequence: Synthetic peptide
VNFIRRFRGM

SEQ ID NO: 617 - protein, 8 aa, Artificial Sequence
  Description of Artificial Sequence: Synthetic peptide
AVRRSQGI

SEQ ID NO: 618 - protein, 10 aa, Artificial Sequence
  Description of Artificial Sequence: Synthetic peptide
FPYFAWVGGM

SEQ ID NO: 619 - protein, 10 aa, Artificial Sequence
  Description of Artificial Sequence: Synthetic peptide
SHYFPWTVAL

SEQ ID NO: 620 - protein, 10 aa, Artificial Sequence
  Description of Artificial Sequence: Synthetic peptide
ASYHASFDGL

SEQ ID NO: 621 - protein, 10 aa, Artificial Sequence
  Description of Artificial Sequence: Synthetic peptide
TSIFKRFAGM

SEQ ID NO: 622 - protein, 6 aa, Artificial Sequence
  Description of Artificial Sequence: Synthetic peptide
YSWGPF

SEQ ID NO: 623 - protein, 5 aa, Artificial Sequence
  Description of Artificial Sequence: Synthetic peptide
YYWPI

SEQ ID NO: 624 - protein, 5 aa, Artificial Sequence
  Description of Artificial Sequence: Synthetic peptide
YYFLI

SEQ ID NO: 625 - protein, 8 aa, Artificial Sequence
  Description of Artificial Sequence: Synthetic peptide
YRYYWRPI

SEQ ID NO: 626 - protein, 6 aa, Artificial Sequence
  Description of Artificial Sequence: Synthetic peptide
GPWGLI

SEQ ID NO: 627 - protein, 6 aa, Artificial Sequence
  Description of Artificial Sequence: Synthetic peptide
RYSSPI

SEQ ID NO: 628 - protein, 8 aa, Artificial Sequence
  Description of Artificial Sequence: Synthetic peptide
YRYWYGPI

SEQ ID NO: 629 - protein, 6 aa, Artificial Sequence
  Description of Artificial Sequence: Synthetic peptide
YSWALF

SEQ ID NO: 630 - protein, 6 aa, Artificial Sequence
  Description of Artificial Sequence: Synthetic peptide
ISWGLI

SEQ ID NO: 631 - protein, 6 aa, Artificial Sequence
  Description of Artificial Sequence: Synthetic peptide
YFSYPI

SEQ ID NO: 632 - protein, 6 aa, Artificial Sequence
  Description of Artificial Sequence: Synthetic peptide
YRWALF

SEQ ID NO: 633 - protein, 6 aa, Artificial Sequence
  Description of Artificial Sequence: Synthetic peptide
YSRILF

SEQ ID NO: 634 - protein, 6 aa, Artificial Sequence
  Description of Artificial Sequence: Synthetic peptide
YSLRPI

SEQ ID NO: 635 - protein, 6 aa, Artificial Sequence
  Description of Artificial Sequence: Synthetic peptide
YSRGLI

SEQ ID NO: 636 - protein, 6 aa, Artificial Sequence
  Description of Artificial Sequence: Synthetic peptide
YFWGLI

SEQ ID NO: 637 - protein, 6 aa, Artificial Sequence
  Description of Artificial Sequence: Synthetic peptide
YSWGLI

SEQ ID NO: 638 - protein, 6 aa, Artificial Sequence
  Description of Artificial Sequence: Synthetic peptide
DSWGLF

SEQ ID NO: 639 - protein, 6 aa, Artificial Sequence
  Description of Artificial Sequence: Synthetic peptide
YYWGLI

SEQ ID NO: 640 - protein, 5 aa, Artificial Sequence
  Description of Artificial Sequence: Synthetic peptide
YYYLI

SEQ ID NO: 641 - protein, 5 aa, Artificial Sequence
  Description of Artificial Sequence: Synthetic peptide
YYILI

SEQ ID NO: 642 - protein, 5 aa, Artificial Sequence
  Description of Artificial Sequence: Synthetic peptide
HSFPI

SEQ ID NO: 643 - protein, 5 aa, Artificial Sequence
  Description of Artificial Sequence: Synthetic peptide
YHHLI

SEQ ID NO: 644 - protein, 5 aa, Artificial Sequence
  Description of Artificial Sequence: Synthetic peptide
YYSPI

SEQ ID NO: 645 - protein, 5 aa, Artificial Sequence
  Description of Artificial Sequence: Synthetic peptide
YYYPI

SEQ ID NO: 646 - protein, 5 aa, Artificial Sequence
  Description of Artificial Sequence: Synthetic peptide
YHFLI

SEQ ID NO: 647 - protein, 5 aa, Artificial Sequence
  Description of Artificial Sequence: Synthetic peptide
YYFPI

SEQ ID NO: 648 - protein, 5 aa, Artificial Sequence
  Description of Artificial Sequence: Synthetic peptide
YDFLI

SEQ ID NO: 649 - protein, 5 aa, Artificial Sequence
  Description of Artificial Sequence: Synthetic peptide
NSFLI

SEQ ID NO: 650 - protein, 5 aa, Artificial Sequence
  Description of Artificial Sequence: Synthetic peptide
YYNPI

SEQ ID NO: 651 - protein, 5 aa, Artificial Sequence
  Description of Artificial Sequence: Synthetic peptide
YGFLI

SEQ ID NO: 652 - protein, 5 aa, Artificial Sequence
  Description of Artificial Sequence: Synthetic peptide
YNFLI

SEQ ID NO: 653 - protein, 5 aa, Artificial Sequence
  Description of Artificial Sequence: Synthetic peptide
SSFLI

SEQ ID NO: 654 - protein, 5 aa, Artificial Sequence
  Description of Artificial Sequence: Synthetic peptide
YVFLI

SEQ ID NO: 655 - protein, 5 aa, Artificial Sequence
  Description of Artificial Sequence: Synthetic peptide
FYGPI

SEQ ID NO: 656 - protein, 5 aa, Artificial Sequence
  Description of Artificial Sequence: Synthetic peptide
YFFLI

SEQ ID NO: 657 - protein, 5 aa, Artificial Sequence
  Description of Artificial Sequence: Synthetic peptide
YYGPI

SEQ ID NO: 658 - protein, 5 aa, Artificial Sequence
  Description of Artificial Sequence: Synthetic peptide
YTLPI

SEQ ID NO: 659 - protein, 5 aa, Artificial Sequence
  Description of Artificial Sequence: Synthetic peptide
YRFPI

SEQ ID NO: 660 - protein, 5 aa, Artificial Sequence
  Description of Artificial Sequence: Synthetic peptide
YHLLI

SEQ ID NO: 661 - protein, 5 aa, Artificial Sequence
  Description of Artificial Sequence: Synthetic peptide
YSFPI

SEQ ID NO: 662 - protein, 5 aa, Artificial Sequence
  Description of Artificial Sequence: Synthetic peptide
YFLPI

SEQ ID NO: 663 - protein, 5 aa, Artificial Sequence
  Description of Artificial Sequence: Synthetic peptide
YDNLI

SEQ ID NO: 664 - protein, 5 aa, Artificial Sequence
  Description of Artificial Sequence: Synthetic peptide
YLFPI

SEQ ID NO: 665 - protein, 5 aa, Artificial Sequence
  Description of Artificial Sequence: Synthetic peptide
YFFPI

SEQ ID NO: 666 - protein, 5 aa, Artificial Sequence
  Description of Artificial Sequence: Synthetic peptide
YYIPI

SEQ ID NO: 667 - protein, 5 aa, Artificial Sequence
  Description of Artificial Sequence: Synthetic peptide
FNFLI

SEQ ID NO: 668 - protein, 5 aa, Artificial Sequence
  Description of Artificial Sequence: Synthetic peptide
YNYLI

SEQ ID NO: 669 - protein, 5 aa, Artificial Sequence
  Description of Artificial Sequence: Synthetic peptide
SYWPI

SEQ ID NO: 670 - protein, 5 aa, Artificial Sequence
  Description of Artificial Sequence: Synthetic peptide
YYRPI

SEQ ID NO: 671 - protein, 6 aa, Artificial Sequence
  Description of Artificial Sequence: Synthetic peptide
ASNNLI

SEQ ID NO: 672 - protein, 6 aa, Artificial Sequence
  Description of Artificial Sequence: Synthetic peptide
SAITPI

SEQ ID NO: 673 - protein, 6 aa, Artificial Sequence
  Description of Artificial Sequence: Synthetic peptide
FSYSPF

SEQ ID NO: 674 - protein, 6 aa, Artificial Sequence
  Description of Artificial Sequence: Synthetic peptide
SSYNLI

SEQ ID NO: 675 - protein, 6 aa, Artificial Sequence
  Description of Artificial Sequence: Synthetic peptide
SYNFPF

SEQ ID NO: 676 - protein, 6 aa, Artificial Sequence
  Description of Artificial Sequence: Synthetic peptide
SSTVPF

SEQ ID NO: 677 - protein, 6 aa, Artificial Sequence
  Description of Artificial Sequence: Synthetic peptide
SNYSLF

SEQ ID NO: 678 - protein, 6 aa, Artificial Sequence
  Description of Artificial Sequence: Synthetic peptide
STYSLI

SEQ ID NO: 679 - protein, 6 aa, Artificial Sequence
  Description of Artificial Sequence: Synthetic peptide
SAFSLI

SEQ ID NO: 680 - protein, 6 aa, Artificial Sequence
  Description of Artificial Sequence: Synthetic peptide
SSYTPI

SEQ ID NO: 681 - protein, 6 aa, Artificial Sequence
  Description of Artificial Sequence: Synthetic peptide
YSNSLI

SEQ ID NO: 682 - protein, 8 aa, Artificial Sequence
  Description of Artificial Sequence: Synthetic peptide
YWAYFSPI

SEQ ID NO: 683 - protein, 6 aa, Artificial Sequence
  Description of Artificial Sequence: Synthetic peptide
ISSYYI

SEQ ID NO: 684 - protein, 6 aa, Artificial Sequence
  Description of Artificial Sequence: Synthetic peptide
FSGDAM

SEQ ID NO: 685 - protein, 6 aa, Artificial Sequence
  Description of Artificial Sequence: Synthetic peptide
ISGAWM

SEQ ID NO: 686 - protein, 6 aa, Artificial Sequence
  Description of Artificial Sequence: Synthetic peptide
FTTYSI

SEQ ID NO: 687 - protein, 6 aa, Artificial Sequence
  Description of Artificial Sequence: Synthetic peptide
FAASGI

SEQ ID NO: 688 - protein, 6 aa, Artificial Sequence
  Description of Artificial Sequence: Synthetic peptide
IFFSSM

SEQ ID NO: 689 - protein, 6 aa, Artificial Sequence
  Description of Artificial Sequence: Synthetic peptide
IRYSSI

SEQ ID NO: 690 - protein, 6 aa, Artificial Sequence
  Description of Artificial Sequence: Synthetic peptide
LAYSSI

SEQ ID NO: 691 - protein, 6 aa, Artificial Sequence
  Description of Artificial Sequence: Synthetic peptide
LRYASM

SEQ ID NO: 692 - protein, 6 aa, Artificial Sequence
  Description of Artificial Sequence: Synthetic peptide
IFYSSI

SEQ ID NO: 693 - protein, 6 aa, Artificial Sequence
  Description of Artificial Sequence: Synthetic peptide
INYSSI

SEQ ID NO: 694 - protein, 6 aa, Artificial Sequence
  Description of Artificial Sequence: Synthetic peptide
IAFSSI

SEQ ID NO: 695 - protein, 6 aa, Artificial Sequence
  Description of Artificial Sequence: Synthetic peptide
LFYSSM

SEQ ID NO: 696 - protein, 6 aa, Artificial Sequence
  Description of Artificial Sequence: Synthetic peptide
ISFASM

SEQ ID NO: 697 - protein, 6 aa, Artificial Sequence
  Description of Artificial Sequence: Synthetic peptide
ISFYSI

SEQ ID NO: 698 - protein, 6 aa, Artificial Sequence
  Description of Artificial Sequence: Synthetic peptide
LFYASM

SEQ ID NO: 699 - protein, 6 aa, Artificial Sequence
  Description of Artificial Sequence: Synthetic peptide
IAYASI

SEQ ID NO: 700 - protein, 6 aa, Artificial Sequence
  Description of Artificial Sequence: Synthetic peptide
ISRSSI

SEQ ID NO: 701 - protein, 6 aa, Artificial Sequence
  Description of Artificial Sequence: Synthetic peptide
ISYASI

SEQ ID NO: 702 - protein, 6 aa, Artificial Sequence
  Description of Artificial Sequence: Synthetic peptide
LDYSSI

SEQ ID NO: 703 - protein, 6 aa, Artificial Sequence
  Description of Artificial Sequence: Synthetic peptide
LSYSAI

SEQ ID NO: 704 - protein, 6 aa, Artificial Sequence
  Description of Artificial Sequence: Synthetic peptide
LSGFGI

SEQ ID NO: 705 - protein, 6 aa, Artificial Sequence
  Description of Artificial Sequence: Synthetic peptide
LSFASM

SEQ ID NO: 706 - protein, 6 aa, Artificial Sequence
  Description of Artificial Sequence: Synthetic peptide
LAYNSI

SEQ ID NO: 707 - protein, 6 aa, Artificial Sequence
  Description of Artificial Sequence: Synthetic peptide
LYYSNI

SEQ ID NO: 708 - protein, 6 aa, Artificial Sequence
  Description of Artificial Sequence: Synthetic peptide
IHYYSI

SEQ ID NO: 709 - protein, 6 aa, Artificial Sequence
  Description of Artificial Sequence: Synthetic peptide
ISFASI

SEQ ID NO: 710 - protein, 6 aa, Artificial Sequence
  Description of Artificial Sequence: Synthetic peptide
LSYFSM

SEQ ID NO: 711 - protein, 6 aa, Artificial Sequence
  Description of Artificial Sequence: Synthetic peptide
ISYFSI

SEQ ID NO: 712 - protein, 6 aa, Artificial Sequence
  Description of Artificial Sequence: Synthetic peptide
LYYNSI

SEQ ID NO: 713 - protein, 6 aa, Artificial Sequence
  Description of Artificial Sequence: Synthetic peptide
LSYASI

SEQ ID NO: 714 - protein, 6 aa, Artificial Sequence
  Description of Artificial Sequence: Synthetic peptide
ISYASM

SEQ ID NO: 715 - protein, 6 aa, Artificial Sequence
  Description of Artificial Sequence: Synthetic peptide
ISYYSI

SEQ ID NO: 716 - protein, 6 aa, Artificial Sequence
  Description of Artificial Sequence: Synthetic peptide
LSHSSI

SEQ ID NO: 717 - protein, 6 aa, Artificial Sequence
  Description of Artificial Sequence: Synthetic peptide
IAYNSM

SEQ ID NO: 718 - protein, 6 aa, Artificial Sequence
  Description of Artificial Sequence: Synthetic peptide
ISLFFM

SEQ ID NO: 719 - protein, 6 aa, Artificial Sequence
  Description of Artificial Sequence: Synthetic peptide
IPSYFM

SEQ ID NO: 720 - protein, 6 aa, Artificial Sequence
  Description of Artificial Sequence: Synthetic peptide
ISSYFI

SEQ ID NO: 721 - protein, 6 aa, Artificial Sequence
  Description of Artificial Sequence: Synthetic peptide
LSSYYM

SEQ ID NO: 722 - protein, 6 aa, Artificial Sequence
  Description of Artificial Sequence: Synthetic peptide
LHSYYI

SEQ ID NO: 723 - protein, 6 aa, Artificial Sequence
  Description of Artificial Sequence: Synthetic peptide
IGSYYM

SEQ ID NO: 724 - protein, 6 aa, Artificial Sequence
  Description of Artificial Sequence: Synthetic peptide
LGSYYI

SEQ ID NO: 725 - protein, 6 aa, Artificial Sequence
  Description of Artificial Sequence: Synthetic peptide
LTSYYI

SEQ ID NO: 726 - protein, 6 aa, Artificial Sequence
  Description of Artificial Sequence: Synthetic peptide
ISTYYM

SEQ ID NO: 727 - protein, 6 aa, Artificial Sequence
  Description of Artificial Sequence: Synthetic peptide
IPLYTI

SEQ ID NO: 728 - protein, 6 aa, Artificial Sequence
  Description of Artificial Sequence: Synthetic peptide
IFSTSI

SEQ ID NO: 729 - protein, 6 aa, Artificial Sequence
  Description of Artificial Sequence: Synthetic peptide
ISYSTM

SEQ ID NO: 730 - protein, 6 aa, Artificial Sequence
  Description of Artificial Sequence: Synthetic peptide
LSSSGM

SEQ ID NO: 731 - protein, 6 aa, Artificial Sequence
  Description of Artificial Sequence: Synthetic peptide
IRGPSI

SEQ ID NO: 732 - protein, 6 aa, Artificial Sequence
  Description of Artificial Sequence: Synthetic peptide
FSSTYM

SEQ ID NO: 733 - protein, 6 aa, Artificial Sequence
  Description of Artificial Sequence: Synthetic peptide
INSSFM

SEQ ID NO: 734 - protein, 6 aa, Artificial Sequence
  Description of Artificial Sequence: Synthetic peptide
IFGYSM

SEQ ID NO: 735 - protein, 6 aa, Artificial Sequence
  Description of Artificial Sequence: Synthetic peptide
FSSSTI

SEQ ID NO: 736 - protein, 6 aa, Artificial Sequence
  Description of Artificial Sequence: Synthetic peptide
LSSSTM

SEQ ID NO: 737 - protein, 6 aa, Artificial Sequence
  Description of Artificial Sequence: Synthetic peptide
ISYTSI

SEQ ID NO: 738 - protein, 6 aa, Artificial Sequence
  Description of Artificial Sequence: Synthetic peptide
FSSSVM

SEQ ID NO: 739 - protein, 6 aa, Artificial Sequence
  Description of Artificial Sequence: Synthetic peptide
IASYSM

SEQ ID NO: 740 - protein, 6 aa, Artificial Sequence
  Description of Artificial Sequence: Synthetic peptide
FSYSSM

SEQ ID NO: 741 - protein, 10 aa, Artificial Sequence
  Description of Artificial Sequence: Synthetic peptide
SIYSSYGYTS

SEQ ID NO: 742 - protein, 10 aa, Artificial Sequence
  Description of Artificial Sequence: Synthetic peptide
SISPYYGYTY

SEQ ID NO: 743 - protein, 10 aa, Artificial Sequence
  Description of Artificial Sequence: Synthetic peptide
RISSSGGYTA

SEQ ID NO: 744 - protein, 10 aa, Artificial Sequence
  Description of Artificial Sequence: Synthetic peptide
RIYPSGGTTD

SEQ ID NO: 745 - protein, 10 aa, Artificial Sequence
  Description of Artificial Sequence: Synthetic peptide
GISTSGGYTD

SEQ ID NO: 746 - protein, 10 aa, Artificial Sequence
  Description of Artificial Sequence: Synthetic peptide
YISPSGGYTD

SEQ ID NO: 747 - protein, 10 aa, Artificial Sequence
  Description of Artificial Sequence: Synthetic peptide
GISSYYGFTY

SEQ ID NO: 748 - protein, 10 aa, Artificial Sequence
  Description of Artificial Sequence: Synthetic peptide
GIFSNYGPTT

SEQ ID NO: 749 - protein, 10 aa, Artificial Sequence
  Description of Artificial Sequence: Synthetic peptide
FISSYYSFTH

SEQ ID NO: 750 - protein, 10 aa, Artificial Sequence
  Description of Artificial Sequence: Synthetic peptide
SISSYYGFTY

SEQ ID NO: 751 - protein, 10 aa, Artificial Sequence
  Description of Artificial Sequence: Synthetic peptide
YIASFYGDTY

SEQ ID NO: 752 - protein, 10 aa, Artificial Sequence
  Description of Artificial Sequence: Synthetic peptide
HISPYYGYTH

SEQ ID NO: 753 - protein, 10 aa, Artificial Sequence
  Description of Artificial Sequence: Synthetic peptide
NITPYYGYTS

SEQ ID NO: 754 - protein, 10 aa, Artificial Sequence
  Description of Artificial Sequence: Synthetic peptide
GISSYYSYTY

SEQ ID NO: 755 - protein, 10 aa, Artificial Sequence
  Description of Artificial Sequence: Synthetic peptide
LITSYYGYTT

SEQ ID NO: 756 - protein, 10 aa, Artificial Sequence
  Description of Artificial Sequence: Synthetic peptide
FISPYYSFTN

SEQ ID NO: 757 - protein, 10 aa, Artificial Sequence
  Description of Artificial Sequence: Synthetic peptide
NITSYYGYTT

SEQ ID NO: 758 - protein, 10 aa, Artificial Sequence
  Description of Artificial Sequence: Synthetic peptide
SISPYYSYTS

SEQ ID NO: 759 - protein, 10 aa, Artificial Sequence
  Description of Artificial Sequence: Synthetic peptide
SISPYYGYTD

SEQ ID NO: 760 - protein, 10 aa, Artificial Sequence
  Description of Artificial Sequence: Synthetic peptide
SISSYYSYTD

SEQ ID NO: 761 - protein, 10 aa, Artificial Sequence
  Description of Artificial Sequence: Synthetic peptide
AIYSYYSYTI

SEQ ID NO: 762 - protein, 10 aa, Artificial Sequence
  Description of Artificial Sequence: Synthetic peptide
SISPYYGFTL

SEQ ID NO: 763 - protein, 10 aa, Artificial Sequence
  Description of Artificial Sequence: Synthetic peptide
SISSYYSYTY

SEQ ID NO: 764 - protein, 10 aa, Artificial Sequence
  Description of Artificial Sequence: Synthetic peptide
SISSYYGYTA

SEQ ID NO: 765 - protein, 10 aa, Artificial Sequence
  Description of Artificial Sequence: Synthetic peptide
GISSYYGYTR

SEQ ID NO: 766 - protein, 10 aa, Artificial Sequence
  Description of Artificial Sequence: Synthetic peptide
SISPYYGYTR

SEQ ID NO: 767 - protein, 10 aa, Artificial Sequence
  Description of Artificial Sequence: Synthetic peptide
SISPYYSYTT

SEQ ID NO: 768 - protein, 10 aa, Artificial Sequence
  Description of Artificial Sequence: Synthetic peptide
GISSYYSYTS

SEQ ID NO: 769 - protein, 10 aa, Artificial Sequence
  Description of Artificial Sequence: Synthetic peptide
SISPYYSFTS

SEQ ID NO: 770 - protein, 10 aa, Artificial Sequence
  Description of Artificial Sequence: Synthetic peptide
FISSYYGYTA

SEQ ID NO: 771 - protein, 10 aa, Artificial Sequence
  Description of Artificial Sequence: Synthetic peptide
SISSYYGYTP

SEQ ID NO: 772 - protein, 10 aa, Artificial Sequence
  Description of Artificial Sequence: Synthetic peptide
SIFSYYSYTN

SEQ ID NO: 773 - protein, 10 aa, Artificial Sequence
  Description of Artificial Sequence: Synthetic peptide
SISSYYGYTL

SEQ ID NO: 774 - protein, 10 aa, Artificial Sequence
  Description of Artificial Sequence: Synthetic peptide
YISSYYGYTS

SEQ ID NO: 775 - protein, 10 aa, Artificial Sequence
  Description of Artificial Sequence: Synthetic peptide
SISPYYSFTD

SEQ ID NO: 776 - protein, 10 aa, Artificial Sequence
  Description of Artificial Sequence: Synthetic peptide
SIYSYYSFTN

SEQ ID NO: 777 - protein, 10 aa, Artificial Sequence
  Description of Artificial Sequence: Synthetic peptide
SIYSYYGFTN

SEQ ID NO: 778 - protein, 10 aa, Artificial Sequence
  Description of Artificial Sequence: Synthetic peptide
TISPYYGYTS

SEQ ID NO: 779 - protein, 10 aa, Artificial Sequence
  Description of Artificial Sequence: Synthetic peptide
HISSYYGFTS

SEQ ID NO: 780 - protein, 10 aa, Artificial Sequence
  Description of Artificial Sequence: Synthetic peptide
AIHPYYGYTS

SEQ ID NO: 781 - protein, 10 aa, Artificial Sequence
  Description of Artificial Sequence: Synthetic peptide
SISSYYGYTG

SEQ ID NO: 782 - protein, 10 aa, Artificial Sequence
  Description of Artificial Sequence: Synthetic peptide
SISPYYGFTY

SEQ ID NO: 783 - protein, 10 aa, Artificial Sequence
  Description of Artificial Sequence: Synthetic peptide
SISSYYGYTD

SEQ ID NO: 784 - protein, 10 aa, Artificial Sequence
  Description of Artificial Sequence: Synthetic peptide
SIYSYYGYTT

SEQ ID NO: 785 - protein, 10 aa, Artificial Sequence
  Description of Artificial Sequence: Synthetic peptide
SISSHYGYTH

SEQ ID NO: 786 - protein, 10 aa, Artificial Sequence
  Description of Artificial Sequence: Synthetic peptide
YISSYYGYTA

SEQ ID NO: 787 - protein, 10 aa, Artificial Sequence
  Description of Artificial Sequence: Synthetic peptide
SISSYYGYTY

SEQ ID NO: 788 - protein, 10 aa, Artificial Sequence
  Description of Artificial Sequence: Synthetic peptide
SIYSSYSYTS

SEQ ID NO: 789 - protein, 10 aa, Artificial Sequence
  Description of Artificial Sequence: Synthetic peptide
SIYSSYSYTA

SEQ ID NO: 790 - protein, 10 aa, Artificial Sequence
  Description of Artificial Sequence: Synthetic peptide
SIYSSYSYTG

SEQ ID NO: 791 - protein, 10 aa, Artificial Sequence
  Description of Artificial Sequence: Synthetic peptide
SIYPSYSYTS

SEQ ID NO: 792 - protein, 10 aa, Artificial Sequence
  Description of Artificial Sequence: Synthetic peptide
SIYSRFSYTA

SEQ ID NO: 793 - protein, 10 aa, Artificial Sequence
  Description of Artificial Sequence: Synthetic peptide
NIYSSYGYTS

SEQ ID NO: 794 - protein, 10 aa, Artificial Sequence
  Description of Artificial Sequence: Synthetic peptide
AIYSPYGYTS

SEQ ID NO: 795 - protein, 10 aa, Artificial Sequence
  Description of Artificial Sequence: Synthetic peptide
TIYSYYSYTS

SEQ ID NO: 796 - protein, 10 aa, Artificial Sequence
  Description of Artificial Sequence: Synthetic peptide
SIYSSFGYTS

SEQ ID NO: 797 - protein, 10 aa, Artificial Sequence
  Description of Artificial Sequence: Synthetic peptide
SISPSYSYTY

SEQ ID NO: 798 - protein, 10 aa, Artificial Sequence
  Description of Artificial Sequence: Synthetic peptide
SITSAYSYTY

SEQ ID NO: 799 - protein, 10 aa, Artificial Sequence
  Description of Artificial Sequence: Synthetic peptide
SIVSSYSRTY

SEQ ID NO: 800 - protein, 10 aa, Artificial Sequence
  Description of Artificial Sequence: Synthetic peptide
AIYPFDGYTY

SEQ ID NO: 801 - protein, 10 aa, Artificial Sequence
  Description of Artificial Sequence: Synthetic peptide
GIFSYFSYTY

SEQ ID NO: 802 - protein, 10 aa, Artificial Sequence
  Description of Artificial Sequence: Synthetic peptide
SISPFCGFTY

SEQ ID NO: 803 - protein, 10 aa, Artificial Sequence
  Description of Artificial Sequence: Synthetic peptide
SITPSYGYTN

SEQ ID NO: 804 - protein, 10 aa, Artificial Sequence
  Description of Artificial Sequence: Synthetic peptide
SISPSYGYTY

SEQ ID NO: 805 - protein, 10 aa, Artificial Sequence
  Description of Artificial Sequence: Synthetic peptide
SIFPCCSNTY

SEQ ID NO: 806 - protein, 10 aa, Artificial Sequence
  Description of Artificial Sequence: Synthetic peptide
SIAPSFGHTY

SEQ ID NO: 807 - protein, 10 aa, Artificial Sequence
  Description of Artificial Sequence: Synthetic peptide
SISPYYSYTR

SEQ ID NO: 808 - protein, 10 aa, Artificial Sequence
  Description of Artificial Sequence: Synthetic peptide
SIFSTYSYTY

SEQ ID NO: 809 - protein, 10 aa, Artificial Sequence
  Description of Artificial Sequence: Synthetic peptide
SIAPSYSFTY

SEQ ID NO: 810 - protein, 10 aa, Artificial Sequence
  Description of Artificial Sequence: Synthetic peptide
SITPYYSTTS

SEQ ID NO: 811 - protein, 10 aa, Artificial Sequence
  Description of Artificial Sequence: Synthetic peptide
FISPYHSYTD

SEQ ID NO: 812 - protein, 10 aa, Artificial Sequence
  Description of Artificial Sequence: Synthetic peptide
SISSRYGYTY

SEQ ID NO: 813 - protein, 10 aa, Artificial Sequence
  Description of Artificial Sequence: Synthetic peptide
AHYFPWAGAM

SEQ ID NO: 814 - protein, 15 aa, Artificial Sequence
  Description of Artificial Sequence: Synthetic peptide
TVRGSKKPYFSGWAM

SEQ ID NO: 815 - protein, 10 aa, Artificial Sequence
  Description of Artificial Sequence: Synthetic peptide
SSYFPWFSAM

SEQ ID NO: 816 - protein, 13 aa, Artificial Sequence
  Description of Artificial Sequence: Synthetic peptide
ASYYSNYYYGPAM

SEQ ID NO: 817 - protein, 18 aa, Artificial Sequence
  Description of Artificial Sequence: Synthetic peptide
GWFSFRSYYRSYYYYSAL

SEQ ID NO: 818 - protein, 15 aa, Artificial Sequence
  Description of Artificial Sequence: Synthetic peptide
SGHPRYYSRRHSYGM

SEQ ID NO: 819 - protein, 13 aa, Artificial Sequence
  Description of Artificial Sequence: Synthetic peptide
SYYSNYYYYYDAM

SEQ ID NO: 820 - protein, 10 aa, Artificial Sequence
  Description of Artificial Sequence: Synthetic peptide
AHYFPWAGAL

SEQ ID NO: 821 - protein, 10 aa, Artificial Sequence
  Description of Artificial Sequence: Synthetic peptide
AHYFRRARGL

SEQ ID NO: 822 - protein, 10 aa, Artificial Sequence
  Description of Artificial Sequence: Synthetic peptide
SHYFPWAGAM

SEQ ID NO: 823 - protein, 10 aa, Artificial Sequence
  Description of Artificial Sequence: Synthetic peptide
AHYFPWAGGM

SEQ ID NO: 824 - protein, 10 aa, Artificial Sequence
  Description of Artificial Sequence: Synthetic peptide
SYYYPRSRGM

SEQ ID NO: 825 - protein, 10 aa, Artificial Sequence
  Description of Artificial Sequence: Synthetic peptide
SHYFPWAVAM

SEQ ID NO: 826 - protein, 10 aa, Artificial Sequence
  Description of Artificial Sequence: Synthetic peptide
SHYFPWFAAM

SEQ ID NO: 827 - protein, 10 aa, Artificial Sequence
  Description of Artificial Sequence: Synthetic peptide
ANYFPWAYAM

SEQ ID NO: 828 - protein, 10 aa, Artificial Sequence
  Description of Artificial Sequence: Synthetic peptide
AHYFPWVVGM

SEQ ID NO: 829 - protein, 10 aa, Artificial Sequence
  Description of Artificial Sequence: Synthetic peptide
SHYFPWAGAL

SEQ ID NO: 830 - protein, 10 aa, Artificial Sequence
  Description of Artificial Sequence: Synthetic peptide
SSYFPWFSAL

SEQ ID NO: 831 - protein, 10 aa, Artificial Sequence
  Description of Artificial Sequence: Synthetic peptide
SSYFPWLSDM

SEQ ID NO: 832 - protein, 10 aa, Artificial Sequence
  Description of Artificial Sequence: Synthetic peptide
SSYFPWVSGM

SEQ ID NO: 833 - protein, 10 aa, Artificial Sequence
  Description of Artificial Sequence: Synthetic peptide
SSYLPWFSAL

SEQ ID NO: 834 - protein, 10 aa, Artificial Sequence
  Description of Artificial Sequence: Synthetic peptide
SSYFPWFTAL

SEQ ID NO: 835 - protein, 10 aa, Artificial Sequence
  Description of Artificial Sequence: Synthetic peptide
SSYFPWVGGF

SEQ ID NO: 836 - protein, 10 aa, Artificial Sequence
  Description of Artificial Sequence: Synthetic peptide
SSRFPWFYGL

SEQ ID NO: 837 - protein, 10 aa, Artificial Sequence
  Description of Artificial Sequence: Synthetic peptide
SSYFPWSSAM

SEQ ID NO: 838 - protein, 10 aa, Artificial Sequence
  Description of Artificial Sequence: Synthetic peptide
SHYFPWLSAL

SEQ ID NO: 839 - protein, 10 aa, Artificial Sequence
  Description of Artificial Sequence: Synthetic peptide
ASYYPWFSAM

SEQ ID NO: 840 - protein, 10 aa, Artificial Sequence
  Description of Artificial Sequence: Synthetic peptide
SSYIPWRYAI

SEQ ID NO: 841 - protein, 10 aa, Artificial Sequence
  Description of Artificial Sequence: Synthetic peptide
SSYFPWISAM

SEQ ID NO: 842 - protein, 10 aa, Artificial Sequence
  Description of Artificial Sequence: Synthetic peptide
SSYFPWISAL

SEQ ID NO: 843 - protein, 10 aa, Artificial Sequence
  Description of Artificial Sequence: Synthetic peptide
SSRFPWISGM

SEQ ID NO: 844 - protein, 10 aa, Artificial Sequence
  Description of Artificial Sequence: Synthetic peptide
SPYFPWSSAL

SEQ ID NO: 845 - protein, 10 aa, Artificial Sequence
  Description of Artificial Sequence: Synthetic peptide
ASYLPWFSAM

SEQ ID NO: 846 - protein, 10 aa, Artificial Sequence
  Description of Artificial Sequence: Synthetic peptide
SSYLPWITAM

SEQ ID NO: 847 - protein, 10 aa, Artificial Sequence
  Description of Artificial Sequence: Synthetic peptide
SAYFPWFAAL

SEQ ID NO: 848 - protein, 10 aa, Artificial Sequence
  Description of Artificial Sequence: Synthetic peptide
SSYFPWFFAM

SEQ ID NO: 849 - protein, 10 aa, Artificial Sequence
  Description of Artificial Sequence: Synthetic peptide
SSHFPWVSAL

SEQ ID NO: 850 - protein, 10 aa, Artificial Sequence
  Description of Artificial Sequence: Synthetic peptide
SSYFPWVSAM

SEQ ID NO: 851 - protein, 10 aa, Artificial Sequence
  Description of Artificial Sequence: Synthetic peptide
SSHFPWFSAM

SEQ ID NO: 852 - protein, 10 aa, Artificial Sequence
  Description of Artificial Sequence: Synthetic peptide
SSYFPWFSAI

SEQ ID NO: 853 - protein, 10 aa, Artificial Sequence
  Description of Artificial Sequence: Synthetic peptide
SSRFPWFPAM

SEQ ID NO: 854 - protein, 10 aa, Artificial Sequence
  Description of Artificial Sequence: Synthetic peptide
SSYVPWFYAL

SEQ ID NO: 855 - protein, 10 aa, Artificial Sequence
  Description of Artificial Sequence: Synthetic peptide
ASYFPWFPAM

SEQ ID NO: 856 - protein, 10 aa, Artificial Sequence
  Description of Artificial Sequence: Synthetic peptide
SSYFPWFFAL

SEQ ID NO: 857 - protein, 10 aa, Artificial Sequence
  Description of Artificial Sequence: Synthetic peptide
SSYYPWFSAL

SEQ ID NO: 858 - protein, 10 aa, Artificial Sequence
  Description of Artificial Sequence: Synthetic peptide
SSYLPWVSAL

SEQ ID NO: 859 - protein, 15 aa, Artificial Sequence
  Description of Artificial Sequence: Synthetic peptide
SFNGAKKPYFSGWAM

SEQ ID NO: 860 - protein, 15 aa, Artificial Sequence
  Description of Artificial Sequence: Synthetic peptide
NVVVSRKPYFFRSAM

SEQ ID NO: 861 - protein, 15 aa, Artificial Sequence
  Description of Artificial Sequence: Synthetic peptide
TVPGSKRPYFASLAI

SEQ ID NO: 862 - protein, 15 aa, Artificial Sequence
  Description of Artificial Sequence: Synthetic peptide
NVRGFRKPYFSRWAM

SEQ ID NO: 863 - protein, 15 aa, Artificial Sequence
  Description of Artificial Sequence: Synthetic peptide
NVPGIKRPYFTAWAM

SEQ ID NO: 864 - protein, 15 aa, Artificial Sequence
  Description of Artificial Sequence: Synthetic peptide
TIRGSKRPYFAASGL

SEQ ID NO: 865 - protein, 15 aa, Artificial Sequence
  Description of Artificial Sequence: Synthetic peptide
TARENKKPYFSGWAM

SEQ ID NO: 866 - protein, 15 aa, Artificial Sequence
  Description of Artificial Sequence: Synthetic peptide
TLPLSKKPYFSLWAF

SEQ ID NO: 867 - protein, 15 aa, Artificial Sequence
  Description of Artificial Sequence: Synthetic peptide
TFHGSKKPYFSGRAM

SEQ ID NO: 868 - protein, 15 aa, Artificial Sequence
  Description of Artificial Sequence: Synthetic peptide
SIRGSKKPYFSRLAL

SEQ ID NO: 869 - protein, 15 aa, Artificial Sequence
  Description of Artificial Sequence: Synthetic peptide
SVRGSKKPYFSHWAM

SEQ ID NO: 870 - protein, 15 aa, Artificial Sequence
  Description of Artificial Sequence: Synthetic peptide
NVRTSKKPYFPLWAM

SEQ ID NO: 871 - protein, 18 aa, Artificial Sequence
  Description of Artificial Sequence: Synthetic peptide
GVSGGSNYISIFRNSSGM

SEQ ID NO: 872 - protein, 18 aa, Artificial Sequence
  Description of Artificial Sequence: Synthetic peptide
GGLSVSHYNYVHSFKWGL

SEQ ID NO: 873 - protein, 18 aa, Artificial Sequence
  Description of Artificial Sequence: Synthetic peptide
SCSSFCNYVSNYNARRAL

SEQ ID NO: 874 - protein, 18 aa, Artificial Sequence
  Description of Artificial Sequence: Synthetic peptide
GNARVSNYISSYYAWRAM

SEQ ID NO: 875 - protein, 18 aa, Artificial Sequence
  Description of Artificial Sequence: Synthetic peptide
GGYGFSYYNSVTFYRWAF

SEQ ID NO: 876 - protein, 18 aa, Artificial Sequence
  Description of Artificial Sequence: Synthetic peptide
VGSGVCNSLHNYFYKRGM

SEQ ID NO: 877 - protein, 18 aa, Artificial Sequence
  Description of Artificial Sequence: Synthetic peptide
SSSDISIDNSIRYTWGAM

SEQ ID NO: 878 - protein, 18 aa, Artificial Sequence
  Description of Artificial Sequence: Synthetic peptide
GHSGVTNFISFYYRRRAM

SEQ ID NO: 879 - protein, 18 aa, Artificial Sequence
  Description of Artificial Sequence: Synthetic peptide
GVSGLDNNRTASYSRMGM

SEQ ID NO: 880 - protein, 18 aa, Artificial Sequence
  Description of Artificial Sequence: Synthetic peptide
GAASVNHIGSLYVSWRGL

SEQ ID NO: 881 - protein, 18 aa, Artificial Sequence
  Description of Artificial Sequence: Synthetic peptide
HGSGLSHNATTSYYRSAI

SEQ ID NO: 882 - protein, 18 aa, Artificial Sequence
  Description of Artificial Sequence: Synthetic peptide
SSSAVSRNSIVYYSRTAM

SEQ ID NO: 883 - protein, 18 aa, Artificial Sequence
  Description of Artificial Sequence: Synthetic peptide
GVCRVSNYSSYFYSRGAM

SEQ ID NO: 884 - protein, 18 aa, Artificial Sequence
  Description of Artificial Sequence: Synthetic peptide
AISHVAHYDNVIYSKWGI

SEQ ID NO: 885 - protein, 18 aa, Artificial Sequence
  Description of Artificial Sequence: Synthetic peptide
GHSVLSNYVSIHYYWAGF

SEQ ID NO: 886 - protein, 5 aa, Artificial Sequence
  Description of Artificial Sequence: Synthetic peptide
GGGGS

SEQ ID NO: 887 - protein, 14 aa, Artificial Sequence
  Description of Artificial Sequence: Synthetic peptide
LEDKTHTKVEPKSS

SEQ ID NO: 888 - protein, 19 aa, Artificial Sequence
  Description of Artificial Sequence: Synthetic peptide
SGSETPGTSESATPESGGG

SEQ ID NO: 889 - protein, 16 aa, Artificial Sequence
  Description of Artificial Sequence: Synthetic peptide
GTTAASGSSGGSSSGA

SEQ ID NO: 890 - protein, 15 aa, Artificial Sequence
  Description of Artificial Sequence: Synthetic peptide
GGGGSGGGGSEPKSS

SEQ ID NO: 891 - protein, 20 aa, Artificial Sequence
  Description of Artificial Sequence: Synthetic peptide
GGGSGGGSGGGSGGGSGSTG

SEQ ID NO: 892 - protein, 20 aa, Artificial Sequence
  Description of Artificial Sequence: Synthetic peptide
GGGGSGGGGSEPKSSDKTHT

SEQ ID NO: 893 - protein, 6 aa, Artificial Sequence
  Description of Artificial Sequence: Synthetic peptide
IHSSSI

SEQ ID NO: 894 - protein, 10 aa, Artificial Sequence
  Description of Artificial Sequence: Synthetic peptide
ATYSSFGSIT

SEQ ID NO: 895 - protein, 9 aa, Artificial Sequence
  Description of Artificial Sequence: Synthetic peptide
YHHPFGYAL

SEQ ID NO: 896 - protein, 5 aa, Artificial Sequence
  Description of Artificial Sequence: Synthetic peptide
GVYLF

SEQ ID NO: 897 - protein, 721 aa, Artificial Sequence
  Description of Artificial Sequence: Synthetic polypeptide
EVQLVESGGGLVQPGGSLRLSCAASGFDFTAYAMHWVRQAPGKGLEWVASIYPSGGYTAYADSVKGRFTISADTSKNTAYLQMNSLRAEDTAVYYCARRSYYFALDYWGQGTLVTVSSGGGGSDIQMTQSPSSLSASVGDRVTITCRASQSVSSAVAWYQQKPGKAPKLLIYSASSLYSGVPSRFSGSRSGTDFTLTISSLQPEDFATYYCQQYWAYYSPITFGQGTKVEIKGGGGSGGGGSEPKTSDKTHTCPPCPAPELLGGPSVFLFPPKPKDTLMISRTPEVTCVVVAVSHEDPEVKFNWYVDGVEVHNAKTKPREEQYGSTYRVVSVLTVLHQDWLNGKEYKCKVSNKALPAPIEKTISKAKGQPREPMVFDLPPSREEMTKNQVSLWCMVKGFYPSDIAVEWESNGQPENNYKTTPPVLDSDGSFFLYSKLTVDKSRWQQGNVFSCSVMHEALHNHYTQKSLSLSPGKGGGSGGGSGGGSGGGSGSTGEVQLVESGGGLVQPGGSLRLSCAASGFTLSSYSMHWVRQAPGKGLEWVAYISSYYGYTYYADSVKGRFTISADTSKNTAYLQMNSLRAEDTAVYYCARPAPGHWGFDYWGQGTLVTVSSASTKGPSVFPLAPSSKSTSGGTAALGCLVKDYFPEPVTVSWNSGALTSGVHTFPAVLQSSGLYSLSSVVTVPSSSLGTQTYICNVNHKPSNTKVDKKVEPKSCDKTHT

SEQ ID NO: 898 - protein, 717 aa, Artificial Sequence
  Description of Artificial Sequence: Synthetic polypeptide
EVQLVESGGGLVQPGGSLRLSCAASGFDFSSSSIHWVRQAPGKGLEWVASISSSYGYTYYADSVKGRFTISADTSKNTAYLQMNSLRAEDTAVYYCARSWAMDYWGQGTLVTVSSGGGGSDIQMTQSPSSLSASVGDRVTITCRASQSVSSAVAWYQQKPGKAPKLLIYSASDLYSGVPSRFSGSRSGTDFTLTISSLQPEDFATYYCQQYAGAGLITFGQGTKVEIKGGGGSGGGGSEPKSSDKTHTCPPCPAPELLGGPSVFLFPPKPKDTLMISRTPEVTCVVVAVSHEDPEVKFNWYVDGVEVHNAKTKPREEQYGSTYRVVSVLTVLHQDWLNGKEYKCKVSNKALPAPIEKTISKAKGQPREPQVYTLPPIRELMTSNQVSLSCAVKGFYPSDIAVEWESNGQPENNYKTTPPVLDSDGSFFLVSKLTVDKSRWQQGNVFSCSVMHEALHNHYTQKSLSLSPGKGGGSGGGSGGGSGGGSGSTGEVQLVESGGGLVQPGGSLRLSCAASGFTLSSYSMHWVRQAPGKGLEWVAYISSYYGYTYYADSVKGRFTISADTSKNTAYLQMNSLRAEDTAVYYCARPAPGHWGFDYWGQGTLVTVSSASTKGPSVFPLAPSSKSTSGGTAALGCLVKDYFPEPVTVSWNSGALTSGVHTFPAVLQSSGLYSLSSVVTVPSSSLGTQTYICNVNHKPSNTKVDKKVEPKSCDKTHT

SEQ ID NO: 899 - protein, 214 aa, Artificial Sequence
  Description of Artificial Sequence: Synthetic polypeptide
DIQMTQSPSSLSASVGDRVTITCRASQSVSSAVAWYQQKPGKAPKLLIYSASSLYSGVPSRFSGSRSGTDFTLTISSLQPEDFATYYCQQWYYAPITFGQGTKVEIKRTVAAPSVFIFPPSDEQLKSGTASVVCLLNNFYPREAKVQWKVDNALQSGNSQESVTEQDSKDSTYSLSSTLTLSKADYEKHKVYACEVTHQGLSSPVTKSFNRGEC

SEQ ID NO: 900 - protein, 745 aa, Artificial Sequence
  Description of Artificial Sequence: Synthetic polypeptide
MNLLLILTFVAAAVAEVQLVESGGGMVQPGGSLRLSCAASGFNFSSSSIHWVRQAPGKGLEWVASISSSYGYTYYADSVKGRFTISADTSKNTAYLQMNSLRAEDTAVYYCARGGSGVSHYGSVYYSWWALDYWGQGTLVTVSSGGGGSDIQMTQSPSSLSASVGDRVTITCRASQSVSSAVAWYQQKPGKAPKLLIYSASSLYSGVPSRFSGSRSGTDFTLTISSLQPEDFATYYCQQASYAPITFGQGTKVEIKGGGGSGGGGSEPKTSDKTHTCPPCPAPELLGGPSVFLFPPKPKDTLMISRTPEVTCVVVAVSHEDPEVKFNWYVDGVEVHNAKTKPREEQYGSTYRVVSVLTVLHQDWLNGKEYKCKVSNKALPAPIEKTISKAKGQPREPMVFDLPPSREEMTKNQVSLWCMVKGFYPSDIAVEWESNGQPENNYKTTPPVLDSDGSFFLYSKLTVDKSRWQQGNVFSCSVMHEALHNHYTQKSLSLSPGKGGGSGGGSGGGSGGGSGSTGEVQLVESGGGLVQPGGSLRLSCAASGFTLSSYSMHWVRQAPGKGLEWVAYISSYYGYTYYADSVKGRFTISADTSKNTAYLQMNSLRAEDTAVYYCARPAPGHWGFDYWGQGTLVTVSSASTKGPSVFPLAPSSKSTSGGTAALGCLVKDYFPEPVTVSWNSGALTSGVHTFPAVLQSSGLYSLSSVVTVPSSSLGTQTYICNVNHKPSNTKVDKKVEPKSCDKTHT

SEQ ID NO: 901 - protein, 738 aa, Artificial Sequence
  Description of Artificial Sequence: Synthetic polypeptide
MNLLLILTFVAAAVAEVQLVESGGGLVQPGGSLRLSCAASGFNLSYYYMHWVRQAPGKGLEWVASIYSSYGYTYYADSVKGRFTISADTSKNTAYLQMNSLRAEDTAVYYCARWSHVSGHYSGMDYWGQGTLVTVSSGGGGSDIQMTQSPSSLSASVGDRVTITCRASQSVSSAVAWYQQKPGKAPKLLIYSASSLYSGVPSRFSGSRSGTDFTLTISSLQPEDFATYYCQQSSYSLITFGQGTKVEIKGGGGSGGGGSEPKSSDKTHTCPPCPAPELLGGPSVFLFPPKPKDTLMISRTPEVTCVVVAVSHEDPEVKFNWYVDGVEVHNAKTKPREEQYGSTYRVVSVLTVLHQDWLNGKEYKCKVSNKALPAPIEKTISKAKGQPREPQVYTLPPIRELMTSNQVSLSCAVKGFYPSDIAVEWESNGQPENNYKTTPPVLDSDGSFFLVSKLTVDKSRWQQGNVFSCSVMHEALHNHYTQKSLSLSPGKGGGSGGGSGGGSGGGSGSTGEVQLVESGGGLVQPGGSLRLSCAASGFTLSSYSMHWVRQAPGKGLEWVAYISSYYGYTYYADSVKGRFTISADTSKNTAYLQMNSLRAEDTAVYYCARPAPGHWGFDYWGQGTLVTVSSASTKGPSVFPLAPSSKSTSGGTAALGCLVKDYFPEPVTVSWNSGALTSGVHTFPAVLQSSGLYSLSSVVTVPSSSLGTQTYICNVNHKPSNTKVDKKVEPKSCDKTHT

SEQ ID NO: 902 - protein, 229 aa, Artificial Sequence
  Description of Artificial Sequence: Synthetic polypeptide
MNLLLILTFVAAAVADIQMTQSPSSLSASVGDRVTITCRASQSVSSAVAWYQQKPGKAPKLLIYSASSLYSGVPSRFSGSRSGTDFTLTISSLQPEDFATYYCQQWYYAPITFGQGTKVEIKRTVAAPSVFIFPPSDEQLKSGTASVVCLLNNFYPREAKVQWKVDNALQSGNSQESVTEQDSKDSTYSLSSTLTLSKADYEKHKVYACEVTHQGLSSPVTKSFNRGEC

SEQ ID NO: 903 - protein, 734 aa, Artificial Sequence
  Description of Artificial Sequence: Synthetic polypeptide
MNLLLILTFVAAAVAEVQLVESGGGLVQPGGSLRLSCAASGFDFTAYAMHWVRQAPGKGLEWVASIYPSGGYTAYADSVKGRFTISADTSKNTAYLQMNSLRAEDTAVYYCARRSYYFALDYWGQGTLVTVSSGGGGSDIQMTQSPSSLSASVGDRVTITCRASQSVSSAVAWYQQKPGKAPKLLIYSASSLYSGVPSRFSGSRSGTDFTLTISSLQPEDFATYYCQQASYAPITFGQGTKVEIKGGGGSGGGGSEPKTSDKTHTCPPCPAPELLGGPSVFLFPPKPKDTLMISRTPEVTCVVVAVSHEDPEVKFNWYVDGVEVHNAKTKPREEQYGSTYRVVSVLTVLHQDWLNGKEYKCKVSNKALPAPIEKTISKAKGQPREPMVFDLPPSREEMTKNQVSLWCMVKGFYPSDIAVEWESNGQPENNYKTTPPVLDSDGSFFLYSKLTVDKSRWQQGNVFSCSVMHEALHNHYTQKSLSLSPGKGGGSGGGSGGGSGGGSGSTGEVQLVESGGGLVQPGGSLRLSCAASGFTLSSYSMHWVRQAPGKGLEWVAYISSYYGYTYYADSVKGRFTISADTSKNTAYLQMNSLRAEDTAVYYCARPAPGHWGFDYWGQGTLVTVSSASTKGPSVFPLAPSSKSTSGGTAALGCLVKDYFPEPVTVSWNSGALTSGVHTFPAVLQSSGLYSLSSVVTVPSSSLGTQTYICNVNHKPSNTKVDKKVEPKSCDKTHT

SEQ ID NO: 904 - protein, 739 aa, Artificial Sequence
  Description of Artificial Sequence: Synthetic polypeptide
MNLLLILTFVAAAVAEVQLVESGGGLVQPGGSLRLSCAASGFNLSYYYMHWVRQAPGKGLEWVASIYSSYGYTYYADSVKGRFTISADTSKNTAYLQMNSLRAEDTAVYYCARWSHVSGHYSGMDYWGQGTLVTVSSGGGGSDIQMTQSPSSLSASVGDRVTITCRASQSVSSAVAWYQQKPGKAPKLLIYSASDLYSGVPSRFSGSRSGTDFTLTISSLQPEDFATYYCQQYAGAGLITFGQGTKVEIKGGGGSGGGGSEPKSSDKTHTCPPCPAPELLGGPSVFLFPPKPKDTLMISRTPEVTCVVVAVSHEDPEVKFNWYVDGVEVHNAKTKPREEQYGSTYRVVSVLTVLHQDWLNGKEYKCKVSNKALPAPIEKTISKAKGQPREPQVYTLPPIRELMTSNQVSLSCAVKGFYPSDIAVEWESNGQPENNYKTTPPVLDSDGSFFLVSKLTVDKSRWQQGNVFSCSVMHEALHNHYTQKSLSLSPGKGGGSGGGSGGGSGGGSGSTGEVQLVESGGGLVQPGGSLRLSCAASGFTLSSYSMHWVRQAPGKGLEWVAYISSYYGYTYYADSVKGRFTISADTSKNTAYLQMNSLRAEDTAVYYCARPAPGHWGFDYWGQGTLVTVSSASTKGPSVFPLAPSSKSTSGGTAALGCLVKDYFPEPVTVSWNSGALTSGVHTFPAVLQSSGLYSLSSVVTVPSSSLGTQTYICNVNHKPSNTKVDKKVEPKSCDKTHT

SEQ ID NO: 905 - protein, 747 aa, Artificial Sequence
  Description of Artificial Sequence: Synthetic polypeptide
MNLLLILTFVAAAVAEVQLVESGGGLVQPGGSLRLSCAASGFNFSSSSIHWVRQAPGKGLEWVASISSSYGYTYYADSVKGRFTISADTSKNTAYLQMNSLRAEDTAVYYCARGGSGVSHYGSVYYSWWALDYWGQGTLVTVSSGGGGSDIQMTQSPSSLSASVGDRVTITCRASQSVSSAVAWYQQKPGKAPKLLIYSASSLYSGVPSRFSGSRSGTDFTLTISSLQPEDFATYYCQQYWAYYSPITFGQGTKVEIKGGGGSGGGGSEPKTSDKTHTCPPCPAPELLGGPSVFLFPPKPKDTLMISRTPEVTCVVVAVSHEDPEVKFNWYVDGVEVHNAKTKPREEQYGSTYRVVSVLTVLHQDWLNGKEYKCKVSNKALPAPIEKTISKAKGQPREPMVFDLPPSREEMTKNQVSLWCMVKGFYPSDIAVEWESNGQPENNYKTTPPVLDSDGSFFLYSKLTVDKSRWQQGNVFSCSVMHEALHNHYTQKSLSLSPGKGGGSGGGSGGGSGGGSGSTGEVQLVESGGGLVQPGGSLRLSCAASGFTLSSYSMHWVRQAPGKGLEWVAYISSYYGYTYYADSVKGRFTISADTSKNTAYLQMNSLRAEDTAVYYCARPAPGHWGFDYWGQGTLVTVSSASTKGPSVFPLAPSSKSTSGGTAALGCLVKDYFPEPVTVSWNSGALTSGVHTFPAVLQSSGLYSLSSVVTVPSSSLGTQTYICNVNHKPSNTKVDKKVEPKSCDKTHT

SEQ ID NO: 906 - protein, 731 aa, Artificial Sequence
  Description of Artificial Sequence: Synthetic polypeptide
MNLLLILTFVAAAVAEVQLVESGGGLVQPGGSLRLSCAASGFNFSSSSIHWVRQAPGKGLEWVASISSSYGYTYYADSVKGRFTISADTSKNTAYLQMNSLRAEDTAVYYCARSWAMDYWGQGTLVTVSSGGGGSDIQMTQSPSSLSASVGDRVTITCRASQSVSSAVAWYQQKPGKAPKLLIYSASSLYSGVPSRFSGSRSGTDFTLTISSLQPEDFATYYCQQSSYSLITFGQGTKVEIKGGGGSGGGGSEPKSSDKTHTCPPCPAPELLGGPSVFLFPPKPKDTLMISRTPEVTCVVVAVSHEDPEVKFNWYVDGVEVHNAKTKPREEQYGSTYRVVSVLTVLHQDWLNGKEYKCKVSNKALPAPIEKTISKAKGQPREPQVYTLPPIRELMTSNQVSLSCAVKGFYPSDIAVEWESNGQPENNYKTTPPVLDSDGSFFLVSKLTVDKSRWQQGNVFSCSVMHEALHNHYTQKSLSLSPGKGGGSGGGSGGGSGGGSGSTGEVQLVESGGGLVQPGGSLRLSCAASGFTLSSYSMHWVRQAPGKGLEWVAYISSYYGYTYYADSVKGRFTISADTSKNTAYLQMNSLRAEDTAVYYCARPAPGHWGFDYWGQGTLVTVSSASTKGPSVFPLAPSSKSTSGGTAALGCLVKDYFPEPVTVSWNSGALTSGVHTFPAVLQSSGLYSLSSVVTVPSSSLGTQTYICNVNHKPSNTKVDKKVEPKSCDKTHT

SEQ ID NO: 907 - protein, 736 aa, Artificial Sequence
  Description of Artificial Sequence: Synthetic polypeptide
MNLLLILTFVAAAVAEVQLVESGGGLVQPGGSLRLSCAASGFDFTAYAMHWVRQAPGKGLEWVASIYPSGGYTAYADSVKGRFTISADTSKNTAYLQMNSLRAEDTAVYYCARRSYYFALDYWGQGTLVTVSSGGGGSDIQMTQSPSSLSASVGDRVTITCRASQSVSSAVAWYQQKPGKAPKLLIYSASSLYSGVPSRFSGSRSGTDFTLTISSLQPEDFATYYCQQYWAYYSPITFGQGTKVEIKGGGGSGGGGSEPKTSDKTHTCPPCPAPELLGGPSVFLFPPKPKDTLMISRTPEVTCVVVAVSHEDPEVKFNWYVDGVEVHNAKTKPREEQYGSTYRVVSVLTVLHQDWLNGKEYKCKVSNKALPAPIEKTISKAKGQPREPMVFDLPPSREEMTKNQVSLWCMVKGFYPSDIAVEWESNGQPENNYKTTPPVLDSDGSFFLYSKLTVDKSRWQQGNVFSCSVMHEALHNHYTQKSLSLSPGKGGGSGGGSGGGSGGGSGSTGEVQLVESGGGLVQPGGSLRLSCAASGFTLSSYSMHWVRQAPGKGLEWVAYISSYDSITDYADSVKGRFTISADTSKNTAYLQMNSLRAEDTAVYYCARPAVGHMAFDYWGQGTLVTVSSASTKGPSVFPLAPSSKSTSGGTAALGCLVKDYFPEPVTVSWNSGALTSGVHTFPAVLQSSGLYSLSSVVTVPSSSLGTQTYICNVNHKPSNTKVDKKVEPKSCDKTHT

SEQ ID NO: 908 - protein, 732 aa, Artificial Sequence
  Description of Artificial Sequence: Synthetic polypeptide
MNLLLILTFVAAAVAEVQLVESGGGLVQPGGSLRLSCAASGFDFSSSSIHWVRQAPGKGLEWVASISSSYGYTYYADSVKGRFTISADTSKNTAYLQMNSLRAEDTAVYYCARSWAMDYWGQGTLVTVSSGGGGSDIQMTQSPSSLSASVGDRVTITCRASQSVSSAVAWYQQKPGKAPKLLIYSASDLYSGVPSRFSGSRSGTDFTLTISSLQPEDFATYYCQQYAGAGLITFGQGTKVEIKGGGGSGGGGSEPKSSDKTHTCPPCPAPELLGGPSVFLFPPKPKDTLMISRTPEVTCVVVAVSHEDPEVKFNWYVDGVEVHNAKTKPREEQYGSTYRVVSVLTVLHQDWLNGKEYKCKVSNKALPAPIEKTISKAKGQPREPQVYTLPPIRELMTSNQVSLSCAVKGFYPSDIAVEWESNGQPENNYKTTPPVLDSDGSFFLVSKLTVDKSRWQQGNVFSCSVMHEALHNHYTQKSLSLSPGKGGGSGGGSGGGSGGGSGSTGEVQLVESGGGLVQPGGSLRLSCAASGFTLSSYSMHWVRQAPGKGLEWVAYISSYDSITDYADSVKGRFTISADTSKNTAYLQMNSLRAEDTAVYYCARPAVGHMAFDYWGQGTLVTVSSASTKGPSVFPLAPSSKSTSGGTAALGCLVKDYFPEPVTVSWNSGALTSGVHTFPAVLQSSGLYSLSSVVTVPSSSLGTQTYICNVNHKPSNTKVDKKVEPKSCDKTHT

SEQ ID NO: 909 - protein, 229 aa, Artificial Sequence
  Description of Artificial Sequence: Synthetic polypeptide
MNLLLILTFVAAAVADIQMTQSPSSLSASVGDRVTITCRASQSVSSAVAWYQQKPGKAPKLLIYSASSLYSGVPSRFSGSRSGTDFTLTISSLQPEDFATYYCQQWYNAPITFGQGTKVEIKRTVAAPSVFIFPPSDEQLKSGTASVVCLLNNFYPREAKVQWKVDNALQSGNSQESVTEQDSKDSTYSLSSTLTLSKADYEKHKVYACEVTHQGLSSPVTKSFNRGEC

SEQ ID NO: 910 - protein, 737 aa, Artificial Sequence
  Description of Artificial Sequence: Synthetic polypeptide
MNLLLILTFVAAAVAEVQLVESGGGLVQPGGSLRLSCAASGFDFTAYAMHWVRQAPGKGLEWVASIYPSGGYTAYADSVKGRFTISADTSKNTAYLQMNSLRAEDTAVYYCARRSYYFALDYWGQGTLVTVSSGGGGSDIQMTQSPSSLSASVGDRVTITCRASQSVSSAVAWYQQKPGKAPKLLIYSASSLYSGVPSRFSGSRSGTDFTLTISSLQPEDFATYYCQQYWAYYSPITFGQGTKVEIKGGGGSGGGGSEPKTSDKTHTCPPCPAPELLGGPSVFLFPPKPKDTLMISRTPEVTCVVVAVSHEDPEVKFNWYVDGVEVHNAKTKPREEQYGSTYRVVSVLTVLHQDWLNGKEYKCKVSNKALPAPIEKTISKAKGQPREPMVFDLPPSREEMTKNQVSLWCMVKGFYPSDIAVEWESNGQPENNYKTTPPVLDSDGSFFLYSKLTVDKSRWQQGNVFSCSVMHEALHNHYTQKSLSLSPGKGGGSGGGSGGGSGGGSGSTGEVQLVESGGGLVQPGGSLRLSCAASGFTSDFYFIHWVRQAPGKGLEWVATIYPFIGNTYYADSVKGRFTISADTSKNTAYLQMNSLRAEDTAVYYCARAFPGSYHPFDYWGQGTLVTVSSASTKGPSVFPLAPSSKSTSGGTAALGCLVKDYFPEPVTVSWNSGALTSGVHTFPAVLQSSGLYSLSSVVTVPSSSLGTQTYICNVNHKPSNTKVDKKVEPKSCDKTHT

SEQ ID NO: 911 - protein, 733 aa, Artificial Sequence
  Description of Artificial Sequence: Synthetic polypeptide
MNLLLILTFVAAAVAEVQLVESGGGLVQPGGSLRLSCAASGFDFSSSSIHWVRQAPGKGLEWVASISSSYGYTYYADSVKGRFTISADTSKNTAYLQMNSLRAEDTAVYYCARSWAMDYWGQGTLVTVSSGGGGSDIQMTQSPSSLSASVGDRVTITCRASQSVSSAVAWYQQKPGKAPKLLIYSASDLYSGVPSRFSGSRSGTDFTLTISSLQPEDFATYYCQQYAGAGLITFGQGTKVEIKGGGGSGGGGSEPKSSDKTHTCPPCPAPELLGGPSVFLFPPKPKDTLMISRTPEVTCVVVAVSHEDPEVKFNWYVDGVEVHNAKTKPREEQYGSTYRVVSVLTVLHQDWLNGKEYKCKVSNKALPAPIEKTISKAKGQPREPQVYTLPPIRELMTSNQVSLSCAVKGFYPSDIAVEWESNGQPENNYKTTPPVLDSDGSFFLVSKLTVDKSRWQQGNVFSCSVMHEALHNHYTQKSLSLSPGKGGGSGGGSGGGSGGGSGSTGEVQLVESGGGLVQPGGSLRLSCAASGFTSDFYFIHWVRQAPGKGLEWVATIYPFIGNTYYADSVKGRFTISADTSKNTAYLQMNSLRAEDTAVYYCARAFPGSYHPFDYWGQGTLVTVSSASTKGPSVFPLAPSSKSTSGGTAALGCLVKDYFPEPVTVSWNSGALTSGVHTFPAVLQSSGLYSLSSVVTVPSSSLGTQTYICNVNHKPSNTKVDKKVEPKSCDKTHT

SEQ ID NO: 912 - protein, 229 aa, Artificial Sequence
  Description of Artificial Sequence: Synthetic polypeptide
MNLLLILTFVAAAVADIQMTQSPSSLSASVGDRVTITCRASQSVSSAVAWYQQKPGKAPKLLIYSASSLYSGVPSRFSGSRSGTDFTLTISSLQPEDFATYYCQQSTGSLITFGQGTKVEIKRTVAAPSVFIFPPSDEQLKSGTASVVCLLNNFYPREAKVQWKVDNALQSGNSQESVTEQDSKDSTYSLSSTLTLSKADYEKHKVYACEVTHQGLSSPVTKSFNRGEC

SEQ ID NO: 913 - protein, 717 aa, Artificial Sequence
  Description of Artificial Sequence: Synthetic polypeptide
EVQLVESGGGLVQPGGSLRLSCAASGFDLSHSSIHWVRQAPGKGLEWVASISSHYGYTHYADSVKGRFTISADTSKNTAYLQMNSLRAEDTAVYYCARSSYFPWFFALDYWGQGTLVTVSSGGGGSDIQMTQSPSSLSASVGDRVTITCRASQSVSSAVAWYQQKPGKAPKLLIYSASSLYSGVPSRFSGSRSGTDFTLTISSLQPEDFATYYCQQYYWPITFGQGTKVEIKGGGGSGGGGSEPKTSDKTHTCPPCPAPELLGGPSVFLFPPKPKDTLMISRTPEVTCVVVAVSHEDPEVKFNWYVDGVEVHNAKTKPREEQYGSTYRVVSVLTVLHQDWLNGKEYKCKVSNKALPAPIEKTISKAKGQPREPMVFDLPPSREEMTKNQVSLWCMVKGFYPSDIAVEWESNGQPENNYKTTPPVLDSDGSFFLYSKLTVDKSRWQQGNVFSCSVMHEALHNHYTQKSLSLSPGKGGGSGGGSGGGSGGGSGSTGEVQLVESGGGLVQPGGSLRLSCAASGFNIAYSSMHWVRQAPGKGLEWVATIYPSYSSTYYADSVKGRFTISADTSKNTAYLQMNSLRAEDTAVYYCARYYAMDYWGQGTLVTVSSASTKGPSVFPLAPSSKSTSGGTAALGCLVKDYFPEPVTVSWNSGALTSGVHTFPAVLQSSGLYSLSSVVTVPSSSLGTQTYICNVNHKPSNTKVDKKVEPKSCDKTHT

SEQ ID NO: 914 - protein, 722 aa, Artificial Sequence
  Description of Artificial Sequence: Synthetic polypeptide
EVQLVESGGGLVQPGGSLRLSCAASGFDISSYFIHWVRQAPGKGLEWVASIYPSYSYTSYADSVKGRFTISADTSKNTAYLQMNSLRAEDTAVYYCARNVRGFRKPYFSRWAMDYWGQGTLVTVSSGGGGSDIQMTQSPSSLSASVGDRVTITCRASQSVSSAVAWYQQKPGKAPKLLIYSASSLYSGVPSRFSGSRSGTDFTLTISSLQPEDFATYYCQQYFFPITFGQGTKVEIKGGGGSGGGGSEPKSSDKTHTCPPCPAPELLGGPSVFLFPPKPKDTLMISRTPEVTCVVVAVSHEDPEVKFNWYVDGVEVHNAKTKPREEQYGSTYRVVSVLTVLHQDWLNGKEYKCKVSNKALPAPIEKTISKAKGQPREPQVYTLPPIRELMTSNQVSLSCAVKGFYPSDIAVEWESNGQPENNYKTTPPVLDSDGSFFLVSKLTVDKSRWQQGNVFSCSVMHEALHNHYTQKSLSLSPGKGGGSGGGSGGGSGGGSGSTGEVQLVESGGGLVQPGGSLRLSCAASGFNIAYSSMHWVRQAPGKGLEWVATIYPSYSSTYYADSVKGRFTISADTSKNTAYLQMNSLRAEDTAVYYCARYYAMDYWGQGTLVTVSSASTKGPSVFPLAPSSKSTSGGTAALGCLVKDYFPEPVTVSWNSGALTSGVHTFPAVLQSSGLYSLSSVVTVPSSSLGTQTYICNVNHKPSNTKVDKKVEPKSCDKTHT

SEQ ID NO: 915 - protein, 214 aa, Artificial Sequence
  Description of Artificial Sequence: Synthetic polypeptide
DIQMTQSPSSLSASVGDRVTITCRASQSVSSAVAWYQQKPGKAPKLLIYSASSLYSGVPSRFSGSRSGTDFTLTISSLQPEDFATYYCQQAHYFPITFGQGTKVEIKRTVAAPSVFIFPPSDEQLKSGTASVVCLLNNFYPREAKVQWKVDNALQSGNSQESVTEQDSKDSTYSLSSTLTLSKADYEKHKVYACEVTHQGLSSPVTKSFNRGEC

SEQ ID NO: 916 - protein, 722 aa, Artificial Sequence
  Description of Artificial Sequence: Synthetic polypeptide
EVQLVESGGGLVQPGGSLRLSCAASGFDLSHSSIHWVRQAPGKGLEWVASISSHYGYTHYADSVKGRFTISADTSKNTAYLQMNSLRAEDTAVYYCARSSYFPWFFALDYWGQGTLVTVSSGGGGSDIQMTQSPSSLSASVGDRVTITCRASQSVSSAVAWYQQKPGKAPKLLIYSASSLYSGVPSRFSGSRSGTDFTLTISSLQPEDFATYYCQQYYWPITFGQGTKVEIKGGGGSGGGGSEPKTSDKTHTCPPCPAPELLGGPSVFLFPPKPKDTLMISRTPEVTCVVVAVSHEDPEVKFNWYVDGVEVHNAKTKPREEQYGSTYRVVSVLTVLHQDWLNGKEYKCKVSNKALPAPIEKTISKAKGQPREPMVFDLPPSREEMTKNQVSLWCMVKGFYPSDIAVEWESNGQPENNYKTTPPVLDSDGSFFLYSKLTVDKSRWQQGNVFSCSVMHEALHNHYTQKSLSLSPGKGGGSGGGSGGGSGGGSGSTGEVQLVESGGGLVQPGGSLRLSCAASGFNIHSSSIHWVRQAPGKGLEWVAATYSSFGSITYADSVKGRFTISADTSKNTAYLQMNSLRAEDTAVYYCARYHHPFGYALDYWGQGTLVTVSSASTKGPSVFPLAPSSKSTSGGTAALGCLVKDYFPEPVTVSWNSGALTSGVHTFPAVLQSSGLYSLSSVVTVPSSSLGTQTYICNVNHKPSNTKVDKKVEPKSCDKTHT

SEQ ID NO: 917 - protein, 727 aa, Artificial Sequence
  Description of Artificial Sequence: Synthetic polypeptide
EVQLVESGGGLVQPGGSLRLSCAASGFDISSYFIHWVRQAPGKGLEWVASIYPSYSYTSYADSVKGRFTISADTSKNTAYLQMNSLRAEDTAVYYCARNVRGFRKPYFSRWAMDYWGQGTLVTVSSGGGGSDIQMTQSPSSLSASVGDRVTITCRASQSVSSAVAWYQQKPGKAPKLLIYSASSLYSGVPSRFSGSRSGTDFTLTISSLQPEDFATYYCQQYFFPITFGQGTKVEIKGGGGSGGGGSEPKSSDKTHTCPPCPAPELLGGPSVFLFPPKPKDTLMISRTPEVTCVVVAVSHEDPEVKFNWYVDGVEVHNAKTKPREEQYGSTYRVVSVLTVLHQDWLNGKEYKCKVSNKALPAPIEKTISKAKGQPREPQVYTLPPIRELMTSNQVSLSCAVKGFYPSDIAVEWESNGQPENNYKTTPPVLDSDGSFFLVSKLTVDKSRWQQGNVFSCSVMHEALHNHYTQKSLSLSPGKGGGSGGGSGGGSGGGSGSTGEVQLVESGGGLVQPGGSLRLSCAASGFNIHSSSIHWVRQAPGKGLEWVAATYSSFGSITYADSVKGRFTISADTSKNTAYLQMNSLRAEDTAVYYCARYHHPFGYALDYWGQGTLVTVSSASTKGPSVFPLAPSSKSTSGGTAALGCLVKDYFPEPVTVSWNSGALTSGVHTFPAVLQSSGLYSLSSVVTVPSSSLGTQTYICNVNHKPSNTKVDKKVEPKSCDKTHT

SEQ ID NO: 918 - protein, 213 aa, Artificial Sequence
  Description of Artificial Sequence: Synthetic polypeptide
DIQMTQSPSSLSASVGDRVTITCRASQSVSSAVAWYQQKPGKAPKLLIYSASSLYSGVPSRFSGSRSGTDFTLTISSLQPEDFATYYCQQGVYLFTFGQGTKVEIKRTVAAPSVFIFPPSDEQLKSGTASVVCLLNNFYPREAKVQWKVDNALQSGNSQESVTEQDSKDSTYSLSSTLTLSKADYEKHKVYACEVTHQGLSSPVTKSFNRGEC

SEQ ID NO: 919 - protein, 735 aa, Artificial Sequence
  Description of Artificial Sequence: Synthetic polypeptide
EFEVQLVESGGGLVQPGGSLRLSCAASGFNSSFYFMHWVRQAPGKGLEWVATVYPYLDYTYYADSVKGRFTISADTSKNTAYLQMNSLRAEDTAVYYCARAFPGSYHPMDYWGQGTLVTVSSGGGGSDIQMTQSPSSLSASVGDRVTITCRASQSVSSAVAWYQQKPGKAPKLLIYSASSLYSGVPSRFSGSRSGTDFTLTISSLQPEDFATYYCQQSSYSLITFGQGTKVEIKLEDKTHTKVEPKTSDKTHTCPPCPAPELLGGPSVFLFPPKPKDTLMISRTPEVTCVVVDVSHEDPEVKFNWYVDGVEVHNAKTKPREEQYNSTYRVVSVLTVLHQDWLNGKEYKCKVSNKALPAPIEKTISKAKGQPREPMVFDLPPSREEMTKNQVSLWCMVKGFYPSDIAVEWESNGQPENNYKTTPPVLDSDGSFFLYSKLTVDKSRWQQGNVFSCSVMHEALHNHYTQKSLSLSPGKSGSETPGTSESATPESGGGEVQLVESGGGLVQPGGSLRLSCAASGFNFSSSSIHWVRQAPGKGLEWVASISSSYGYTYYADSVKGRFTISADTSKNTAYLQMNSLRAEDTAVYYCARGGSGVSHYGSVYYSWWALDYWGQGTLVTVSSGGGGSDIQMTQSPSSLSASVGDRVTITCRASQSVSSAVAWYQQKPGKAPKLLIYSASSLYSGVPSRFSGSRSGTDFTLTISSLQPEDFATYYCQQASYAPITFGQGTKVEIK

SEQ ID NO: 920 - protein, 728 aa, Artificial Sequence
  Description of Artificial Sequence: Synthetic polypeptide
EFEVQLVESGGGLVQPGGSLRLSCAASGFNSSFYFMHWVRQAPGKGLEWVATVYPYLDYTYYADSVKGRFTISADTSKNTAYLQMNSLRAEDTAVYYCARAFPGSYHPMDYWGQGTLVTVSSGGGGSDIQMTQSPSSLSASVGDRVTITCRASQSVSSAVAWYQQKPGKAPKLLIYSASSLYSGVPSRFSGSRSGTDFTLTISSLQPEDFATYYCQQSSYSLITFGQGTKVEIKLEDKTHTKVEPKSSDKTHNCPPCPAPELLGGPSVFLFPPKPKDTLMISRTPEVTCVVVDVSHEDPEVKFNWYVDGVEVHNAKTKPREEQYNSTYRVVSVLTVLHQDWLNGKEYKCKVSNKALPAPIEKTISKAKGQPREPQVYTLPPIRELMTSNQVSLSCAVKGFYPSDIAVEWESNGQPENNYKTTPPVLDSDGSFFLVSKLTVDKSRWQQGNVFSCSVMHEALHNHYTQKSLSLSPGKSGSETPGTSESATPESGGGEVQLVESGGGLVQPGGSLRLSCAASGFNLSYYYMHWVRQAPGKGLEWVASIYSSYGYTYYADSVKGRFTISADTSKNTAYLQMNSLRAEDTAVYYCARWSHVSGHYSGMDYWGQGTLVTVSSGGGGSDIQMTQSPSSLSASVGDRVTITCRASQSVSSAVAWYQQKPGKAPKLLIYSASSLYSGVPSRFSGSRSGTDFTLTISSLQPEDFATYYCQQSSYSLITFGQGTKVEIK

SEQ ID NO: 921 - protein, 712 aa, Artificial Sequence
  Description of Artificial Sequence: Synthetic polypeptide
MNLLLILTFVAAAVAEVQLVESGGGLVQPGGSLRLSCAASGFTLSSYSMHWVRQAPGKGLEWVAYISSYDSITDYADSVKGRFTISADTSKNTAYLQMNSLRAEDTAVYYCARPAVGHMAFDYWGQGTLVTVSSASTKGPSVFPLAPSSKSTSGGTAALGCLVKDYFPEPVTVSWNSGALTSGVHTFPAVLQSSGLYSLSSVVTVPSSSLGTQTYICNVNHKPSNTKVDKKVEPKSCDKTHTCPPCPAPELLGGPSVFLFPPKPKDTLMISRTPEVTCVVVAVSHEDPEVKFNWYVDGVEVHNAKTKPREEQYGSTYRVVSVLTVLHQDWLNGKEYKCKVSNKALPAPIEKTISKAKGQPREPQVYTLPPIRELMTSNQVSLSCAVKGFYPSDIAVEWESNGQPENNYKTTPPVLDSDGSFFLVSKLTVDKSRWQQGNVFSCSVMHEALHNHYTQKSLSLSPGKGGGSGGGSGGGSGGGSGSTGEVQLVESGGGLVQPGGSLRLSCAASGFDFSSSSIHWVRQAPGKGLEWVASISSSYGYTYYADSVKGRFTISADTSKNTAYLQMNSLRAEDTAVYYCARSWAMDYWGQGTLVTVSSGGGGSDIQMTQSPSSLSASVGDRVTITCRASQSVSSAVAWYQQKPGKAPKLLIYSASDLYSGVPSRFSGSRSGTDFTLTISSLQPEDFATYYCQQYAGAGLITFGQGTKVEIK

SEQ ID NO: 922 - protein, 712 aa, Artificial Sequence
  Description of Artificial Sequence: Synthetic polypeptide
MNLLLILTFVAAAVAEVQLVESGGGLVQPGGSLRLSCAASGFTLSSYSMHWVRQAPGKGLEWVAYISSYDSITDYADSVKGRFTISADTSKNTAYLQMNSLRAEDTAVYYCARPAVGHMAFDYWGQGTLVTVSSASTKGPSVFPLAPSSKSTSGGTAALGCLVKDYFPEPVTVSWNSGALTSGVHTFPAVLQSSGLYSLSSVVTVPSSSLGTQTYICNVNHKPSNTKVDKKVEPKSCDKTHTCPPCPAPEAAGGPSVFLFPPKPKDTLMISRTPEVTCVVVDVSHEDPEVKFNWYVDGVEVHNAKTKPREEQYNSTYRVVSVLTVLHQDWLNGKEYKCKVSNKALPASIEKTISKAKGQPREPQVYTLPPIRELMTSNQVSLSCAVKGFYPSDIAVEWESNGQPENNYKTTPPVLDSDGSFFLVSKLTVDKSRWQQGNVFSCSVMHEALHNHYTQKSLSLSPGKGGGSGGGSGGGSGGGSGSTGEVQLVESGGGLVQPGGSLRLSCAASGFDFSSSSIHWVRQAPGKGLEWVASISSSYGYTYYADSVKGRFTISADTSKNTAYLQMNSLRAEDTAVYYCARSWAMDYWGQGTLVTVSSGGGGSDIQMTQSPSSLSASVGDRVTITCRASQSVSSAVAWYQQKPGKAPKLLIYSASDLYSGVPSRFSGSRSGTDFTLTISSLQPEDFATYYCQQYAGAGLITFGQGTKVEIK

SEQ ID NO: 923 - protein, 712 aa, Artificial Sequence
  Description of Artificial Sequence: Synthetic polypeptide
MNLLLILTFVAAAVAEVQLVESGGGLVQPGGSLRLSCAASGFTLSSYSMHWVRQAPGKGLEWVAYISSYDSITDYADSVKGRFTISADTSKNTAYLQMNSLRAEDTAVYYCARPAVGHMAFDYWGQGTLVTVSSASTKGPSVFPLAPSSKSTSGGTAALGCLVKDYFPEPVTVSWNSGALTSGVHTFPAVLQSSGLYSLSSVVTVPSSSLGTQTYICNVNHKPSNTKVDKKVEPKSCDKTHTCPPCPAPEAAGGPSVFLFPPKPKDTLMISRTPEVTCVVVDVSHEDPEVKFNWYVDGVEVHNAKTKPREEQYNSTYRVVSVLTVLHQDWLNGKEYKCKVSNKALPASIEKTISKAKGQPREPQVYTLPPSREEMTKNQVSLSCAVKGFYPSDIAVEWESNGQPENNYKTTPPVLDSDGSFFLVSKLTVDKSRWQQGNVFSCSVMHEALHNHYTQKSLSLSPGKGGGSGGGSGGGSGGGSGSTGEVQLVESGGGLVQPGGSLRLSCAASGFDFSSSSIHWVRQAPGKGLEWVASISSSYGYTYYADSVKGRFTISADTSKNTAYLQMNSLRAEDTAVYYCARSWAMDYWGQGTLVTVSSGGGGSDIQMTQSPSSLSASVGDRVTITCRASQSVSSAVAWYQQKPGKAPKLLIYSASDLYSGVPSRFSGSRSGTDFTLTISSLQPEDFATYYCQQYAGAGLITFGQGTKVEIK

SEQ ID NO: 924 - protein, 712 aa, Artificial Sequence
  Description of Artificial Sequence: Synthetic polypeptide
MNLLLILTFVAAAVAEVQLVESGGGLVQPGGSLRLSCAASGFTLSSYSMHWVRQAPGKGLEWVAYISSYDSITDYADSVKGRFTISADTSKNTAYLQMNSLRAEDTAVYYCARPAVGHMAFDYWGQGTLVTVSSASTKGPSVFPLAPSSKSTSGGTAALGCLVKDYFPEPVTVSWNSGALTSGVHTFPAVLQSSGLYSLSSVVTVPSSSLGTQTYICNVNHKPSNTKVDKKVEPKSCDKTHTCPPCPAPEAAGGPSVFLFPPKPKDTLMISRTPEVTCVVVDVSHEDPEVKFNWYVDGVEVHNAKTKPREEQYNSTYRVVSVLTVLHQDWLNGKEYKCKVSNKALPASIEKTISKAKGQPREPQVCTLPPSREEMTKNQVSLSCAVKGFYPSDIAVEWESNGQPENNYKTTPPVLDSDGSFFLVSKLTVDKSRWQQGNVFSCSVMHEALHNHYTQKSLSLSPGKGGGSGGGSGGGSGGGSGSTGEVQLVESGGGLVQPGGSLRLSCAASGFDFSSSSIHWVRQAPGKGLEWVASISSSYGYTYYADSVKGRFTISADTSKNTAYLQMNSLRAEDTAVYYCARSWAMDYWGQGTLVTVSSGGGGSDIQMTQSPSSLSASVGDRVTITCRASQSVSSAVAWYQQKPGKAPKLLIYSASDLYSGVPSRFSGSRSGTDFTLTISSLQPEDFATYYCQQYAGAGLITFGQGTKVEIK

SEQ ID NO: 925 - protein, 697 aa, Artificial Sequence
  Description of Artificial Sequence: Synthetic polypeptide
EVQLVESGGGLVQPGGSLRLSCAASGFTLSSYSMHWVRQAPGKGLEWVAYISSYDSITDYADSVKGRFTISADTSKNTAYLQMNSLRAEDTAVYYCARPAVGHMAFDYWGQGTLVTVSSASTKGPSVFPLAPSSKSTSGGTAALGCLVKDYFPEPVTVSWNSGALTSGVHTFPAVLQSSGLYSLSSVVTVPSSSLGTQTYICNVNHKPSNTKVDKKVEPKSCDKTHTCPPCPAPELLGGPSVFLFPPKPKDTLMISRTPEVTCVVVAVSHEDPEVKFNWYVDGVEVHNAKTKPREEQYGSTYRVVSVLTVLHQDWLNGKEYKCKVSNKALPAPIEKTISKAKGQPREPQVYTLPPIRELMTSNQVSLSCAVKGFYPSDIAVEWESNGQPENNYKTTPPVLDSDGSFFLVSKLTVDKSRWQQGNVFSCSVMHEALHNHYTQKSLSLSPGKGGGSGGGSGGGSGGGSGSTGEVQLVESGGGLVQPGGSLRLSCAASGFDFSSSSIHWVRQAPGKGLEWVASISSSYGYTYYADSVKGRFTISADTSKNTAYLQMNSLRAEDTAVYYCARSWAMDYWGQGTLVTVSSGGGGSDIQMTQSPSSLSASVGDRVTITCRASQSVSSAVAWYQQKPGKAPKLLIYSASDLYSGVPSRFSGSRSGTDFTLTISSLQPEDFATYYCQQYAGAGLITFGQGTKVEIK

SEQ ID NO: 926 - protein, 697 aa, Artificial Sequence
  Description of Artificial Sequence: Synthetic polypeptide
EVQLVESGGGLVQPGGSLRLSCAASGFTLSSYSMHWVRQAPGKGLEWVAYISSYDSITDYADSVKGRFTISADTSKNTAYLQMNSLRAEDTAVYYCARPAVGHMAFDYWGQGTLVTVSSASTKGPSVFPLAPSSKSTSGGTAALGCLVKDYFPEPVTVSWNSGALTSGVHTFPAVLQSSGLYSLSSVVTVPSSSLGTQTYICNVNHKPSNTKVDKKVEPKSCDKTHTCPPCPAPEAAGGPSVFLFPPKPKDTLMISRTPEVTCVVVDVSHEDPEVKFNWYVDGVEVHNAKTKPREEQYNSTYRVVSVLTVLHQDWLNGKEYKCKVSNKALPASIEKTISKAKGQPREPQVYTLPPIRELMTSNQVSLSCAVKGFYPSDIAVEWESNGQPENNYKTTPPVLDSDGSFFLVSKLTVDKSRWQQGNVFSCSVMHEALHNHYTQKSLSLSPGKGGGSGGGSGGGSGGGSGSTGEVQLVESGGGLVQPGGSLRLSCAASGFDFSSSSIHWVRQAPGKGLEWVASISSSYGYTYYADSVKGRFTISADTSKNTAYLQMNSLRAEDTAVYYCARSWAMDYWGQGTLVTVSSGGGGSDIQMTQSPSSLSASVGDRVTITCRASQSVSSAVAWYQQKPGKAPKLLIYSASDLYSGVPSRFSGSRSGTDFTLTISSLQPEDFATYYCQQYAGAGLITFGQGTKVEIK

SEQ ID NO: 927 - protein, 697 aa, Artificial Sequence
  Description of Artificial Sequence: Synthetic polypeptide
EVQLVESGGGLVQPGGSLRLSCAASGFTLSSYSMHWVRQAPGKGLEWVAYISSYDSITDYADSVKGRFTISADTSKNTAYLQMNSLRAEDTAVYYCARPAVGHMAFDYWGQGTLVTVSSASTKGPSVFPLAPSSKSTSGGTAALGCLVKDYFPEPVTVSWNSGALTSGVHTFPAVLQSSGLYSLSSVVTVPSSSLGTQTYICNVNHKPSNTKVDKKVEPKSCDKTHTCPPCPAPEAAGGPSVFLFPPKPKDTLMISRTPEVTCVVVDVSHEDPEVKFNWYVDGVEVHNAKTKPREEQYNSTYRVVSVLTVLHQDWLNGKEYKCKVSNKALPASIEKTISKAKGQPREPQVYTLPPSREEMTKNQVSLSCAVKGFYPSDIAVEWESNGQPENNYKTTPPVLDSDGSFFLVSKLTVDKSRWQQGNVFSCSVMHEALHNHYTQKSLSLSPGKGGGSGGGSGGGSGGGSGSTGEVQLVESGGGLVQPGGSLRLSCAASGFDFSSSSIHWVRQAPGKGLEWVASISSSYGYTYYADSVKGRFTISADTSKNTAYLQMNSLRAEDTAVYYCARSWAMDYWGQGTLVTVSSGGGGSDIQMTQSPSSLSASVGDRVTITCRASQSVSSAVAWYQQKPGKAPKLLIYSASDLYSGVPSRFSGSRSGTDFTLTISSLQPEDFATYYCQQYAGAGLITFGQGTKVEIK

SEQ ID NO: 928 - protein, 697 aa, Artificial Sequence
  Description of Artificial Sequence: Synthetic polypeptide
EVQLVESGGGLVQPGGSLRLSCAASGFTLSSYSMHWVRQAPGKGLEWVAYISSYDSITDYADSVKGRFTISADTSKNTAYLQMNSLRAEDTAVYYCARPAVGHMAFDYWGQGTLVTVSSASTKGPSVFPLAPSSKSTSGGTAALGCLVKDYFPEPVTVSWNSGALTSGVHTFPAVLQSSGLYSLSSVVTVPSSSLGTQTYICNVNHKPSNTKVDKKVEPKSCDKTHTCPPCPAPEAAGGPSVFLFPPKPKDTLMISRTPEVTCVVVDVSHEDPEVKFNWYVDGVEVHNAKTKPREEQYNSTYRVVSVLTVLHQDWLNGKEYKCKVSNKALPASIEKTISKAKGQPREPQVCTLPPSREEMTKNQVSLSCAVKGFYPSDIAVEWESNGQPENNYKTTPPVLDSDGSFFLVSKLTVDKSRWQQGNVFSCSVMHEALHNHYTQKSLSLSPGKGGGSGGGSGGGSGGGSGSTGEVQLVESGGGLVQPGGSLRLSCAASGFDFSSSSIHWVRQAPGKGLEWVASISSSYGYTYYADSVKGRFTISADTSKNTAYLQMNSLRAEDTAVYYCARSWAMDYWGQGTLVTVSSGGGGSDIQMTQSPSSLSASVGDRVTITCRASQSVSSAVAWYQQKPGKAPKLLIYSASDLYSGVPSRFSGSRSGTDFTLTISSLQPEDFATYYCQQYAGAGLITFGQGTKVEIK

SEQ ID NO: 929 - protein, 716 aa, Artificial Sequence
  Description of Artificial Sequence: Synthetic polypeptide
MNLLLILTFVAAAVAEVQLVESGGGLVQPGGSLRLSCAASGFTLSSYSMHWVRQAPGKGLEWVAYISSYDSITDYADSVKGRFTISADTSKNTAYLQMNSLRAEDTAVYYCARPAVGHMAFDYWGQGTLVTVSSASTKGPSVFPLAPSSKSTSGGTAALGCLVKDYFPEPVTVSWNSGALTSGVHTFPAVLQSSGLYSLSSVVTVPSSSLGTQTYICNVNHKPSNTKVDKKVEPKSCDKTHTCPPCPAPELLGGPSVFLFPPKPKDTLMISRTPEVTCVVVAVSHEDPEVKFNWYVDGVEVHNAKTKPREEQYGSTYRVVSVLTVLHQDWLNGKEYKCKVSNKALPAPIEKTISKAKGQPREPMVFDLPPSREEMTKNQVSLWCMVKGFYPSDIAVEWESNGQPENNYKTTPPVLDSDGSFFLYSKLTVDKSRWQQGNVFSCSVMHEALHNHYTQKSLSLSPGKGGGSGGGSGGGSGGGSGSTGEVQLVESGGGLVQPGGSLRLSCAASGFDFTAYAMHWVRQAPGKGLEWVASIYPSGGYTAYADSVKGRFTISADTSKNTAYLQMNSLRAEDTAVYYCARRSYYFALDYWGQGTLVTVSSGGGGSDIQMTQSPSSLSASVGDRVTITCRASQSVSSAVAWYQQKPGKAPKLLIYSASSLYSGVPSRFSGSRSGTDFTLTISSLQPEDFATYYCQQYWAYYSPITFGQGTKVEIK

SEQ ID NO: 930 - protein, 716 aa, Artificial Sequence
  Description of Artificial Sequence: Synthetic polypeptide
MNLLLILTFVAAAVAEVQLVESGGGLVQPGGSLRLSCAASGFTLSSYSMHWVRQAPGKGLEWVAYISSYDSITDYADSVKGRFTISADTSKNTAYLQMNSLRAEDTAVYYCARPAVGHMAFDYWGQGTLVTVSSASTKGPSVFPLAPSSKSTSGGTAALGCLVKDYFPEPVTVSWNSGALTSGVHTFPAVLQSSGLYSLSSVVTVPSSSLGTQTYICNVNHKPSNTKVDKKVEPKSCDKTHTCPPCPAPEAAGGPSVFLFPPKPKDTLMISRTPEVTCVVVDVSHEDPEVKFNWYVDGVEVHNAKTKPREEQYNSTYRVVSVLTVLHQDWLNGKEYKCKVSNKALPASIEKTISKAKGQPREPMVFDLPPSREEMTKNQVSLWCMVKGFYPSDIAVEWESNGQPENNYKTTPPVLDSDGSFFLYSKLTVDKSRWQQGNVFSCSVMHEALHNHYTQKSLSLSPGKGGGSGGGSGGGSGGGSGSTGEVQLVESGGGLVQPGGSLRLSCAASGFDFTAYAMHWVRQAPGKGLEWVASIYPSGGYTAYADSVKGRFTISADTSKNTAYLQMNSLRAEDTAVYYCARRSYYFALDYWGQGTLVTVSSGGGGSDIQMTQSPSSLSASVGDRVTITCRASQSVSSAVAWYQQKPGKAPKLLIYSASSLYSGVPSRFSGSRSGTDFTLTISSLQPEDFATYYCQQYWAYYSPITFGQGTKVEIK

SEQ ID NO: 931 - protein, 716 aa, Artificial Sequence
  Description of Artificial Sequence: Synthetic polypeptide
MNLLLILTFVAAAVAEVQLVESGGGLVQPGGSLRLSCAASGFTLSSYSMHWVRQAPGKGLEWVAYISSYDSITDYADSVKGRFTISADTSKNTAYLQMNSLRAEDTAVYYCARPAVGHMAFDYWGQGTLVTVSSASTKGPSVFPLAPSSKSTSGGTAALGCLVKDYFPEPVTVSWNSGALTSGVHTFPAVLQSSGLYSLSSVVTVPSSSLGTQTYICNVNHKPSNTKVDKKVEPKSCDKTHTCPPCPAPEAAGGPSVFLFPPKPKDTLMISRTPEVTCVVVDVSHEDPEVKFNWYVDGVEVHNAKTKPREEQYNSTYRVVSVLTVLHQDWLNGKEYKCKVSNKALPASIEKTISKAKGQPREPQVYTLPPSREEMTKNQVSLWCLVKGFYPSDIAVEWESNGQPENNYKTTPPVLDSDGSFFLYSKLTVDKSRWQQGNVFSCSVMHEALHNHYTQKSLSLSPGKGGGSGGGSGGGSGGGSGSTGEVQLVESGGGLVQPGGSLRLSCAASGFDFTAYAMHWVRQAPGKGLEWVASIYPSGGYTAYADSVKGRFTISADTSKNTAYLQMNSLRAEDTAVYYCARRSYYFALDYWGQGTLVTVSSGGGGSDIQMTQSPSSLSASVGDRVTITCRASQSVSSAVAWYQQKPGKAPKLLIYSASSLYSGVPSRFSGSRSGTDFTLTISSLQPEDFATYYCQQYWAYYSPITFGQGTKVEIK

SEQ ID NO: 932 - protein, 716 aa, Artificial Sequence
  Description of Artificial Sequence: Synthetic polypeptide
MNLLLILTFVAAAVAEVQLVESGGGLVQPGGSLRLSCAASGFTLSSYSMHWVRQAPGKGLEWVAYISSYDSITDYADSVKGRFTISADTSKNTAYLQMNSLRAEDTAVYYCARPAVGHMAFDYWGQGTLVTVSSASTKGPSVFPLAPSSKSTSGGTAALGCLVKDYFPEPVTVSWNSGALTSGVHTFPAVLQSSGLYSLSSVVTVPSSSLGTQTYICNVNHKPSNTKVDKKVEPKSCDKTHTCPPCPAPEAAGGPSVFLFPPKPKDTLMISRTPEVTCVVVDVSHEDPEVKFNWYVDGVEVHNAKTKPREEQYNSTYRVVSVLTVLHQDWLNGKEYKCKVSNKALPASIEKTISKAKGQPREPQVYTLPPCREEMTKNQVSLWCLVKGFYPSDIAVEWESNGQPENNYKTTPPVLDSDGSFFLYSKLTVDKSRWQQGNVFSCSVMHEALHNHYTQKSLSLSPGKGGGSGGGSGGGSGGGSGSTGEVQLVESGGGLVQPGGSLRLSCAASGFDFTAYAMHWVRQAPGKGLEWVASIYPSGGYTAYADSVKGRFTISADTSKNTAYLQMNSLRAEDTAVYYCARRSYYFALDYWGQGTLVTVSSGGGGSDIQMTQSPSSLSASVGDRVTITCRASQSVSSAVAWYQQKPGKAPKLLIYSASSLYSGVPSRFSGSRSGTDFTLTISSLQPEDFATYYCQQYWAYYSPITFGQGTKVEIK

SEQ ID NO: 933 - protein, 701 aa, Artificial Sequence
  Description of Artificial Sequence: Synthetic polypeptide
EVQLVESGGGLVQPGGSLRLSCAASGFTLSSYSMHWVRQAPGKGLEWVAYISSYDSITDYADSVKGRFTISADTSKNTAYLQMNSLRAEDTAVYYCARPAVGHMAFDYWGQGTLVTVSSASTKGPSVFPLAPSSKSTSGGTAALGCLVKDYFPEPVTVSWNSGALTSGVHTFPAVLQSSGLYSLSSVVTVPSSSLGTQTYICNVNHKPSNTKVDKKVEPKSCDKTHTCPPCPAPELLGGPSVFLFPPKPKDTLMISRTPEVTCVVVAVSHEDPEVKFNWYVDGVEVHNAKTKPREEQYGSTYRVVSVLTVLHQDWLNGKEYKCKVSNKALPAPIEKTISKAKGQPREPMVFDLPPSREEMTKNQVSLWCMVKGFYPSDIAVEWESNGQPENNYKTTPPVLDSDGSFFLYSKLTVDKSRWQQGNVFSCSVMHEALHNHYTQKSLSLSPGKGGGSGGGSGGGSGGGSGSTGEVQLVESGGGLVQPGGSLRLSCAASGFDFTAYAMHWVRQAPGKGLEWVASIYPSGGYTAYADSVKGRFTISADTSKNTAYLQMNSLRAEDTAVYYCARRSYYFALDYWGQGTLVTVSSGGGGSDIQMTQSPSSLSASVGDRVTITCRASQSVSSAVAWYQQKPGKAPKLLIYSASSLYSGVPSRFSGSRSGTDFTLTISSLQPEDFATYYCQQYWAYYSPITFGQGTKVEIK

SEQ ID NO: 934 - protein, 701 aa, Artificial Sequence
  Description of Artificial Sequence: Synthetic polypeptide
EVQLVESGGGLVQPGGSLRLSCAASGFTLSSYSMHWVRQAPGKGLEWVAYISSYDSITDYADSVKGRFTISADTSKNTAYLQMNSLRAEDTAVYYCARPAVGHMAFDYWGQGTLVTVSSASTKGPSVFPLAPSSKSTSGGTAALGCLVKDYFPEPVTVSWNSGALTSGVHTFPAVLQSSGLYSLSSVVTVPSSSLGTQTYICNVNHKPSNTKVDKKVEPKSCDKTHTCPPCPAPEAAGGPSVFLFPPKPKDTLMISRTPEVTCVVVDVSHEDPEVKFNWYVDGVEVHNAKTKPREEQYNSTYRVVSVLTVLHQDWLNGKEYKCKVSNKALPASIEKTISKAKGQPREPMVFDLPPSREEMTKNQVSLWCMVKGFYPSDIAVEWESNGQPENNYKTTPPVLDSDGSFFLYSKLTVDKSRWQQGNVFSCSVMHEALHNHYTQKSLSLSPGKGGGSGGGSGGGSGGGSGSTGEVQLVESGGGLVQPGGSLRLSCAASGFDFTAYAMHWVRQAPGKGLEWVASIYPSGGYTAYADSVKGRFTISADTSKNTAYLQMNSLRAEDTAVYYCARRSYYFALDYWGQGTLVTVSSGGGGSDIQMTQSPSSLSASVGDRVTITCRASQSVSSAVAWYQQKPGKAPKLLIYSASSLYSGVPSRFSGSRSGTDFTLTISSLQPEDFATYYCQQYWAYYSPITFGQGTKVEIK

SEQ ID NO: 935 - protein, 701 aa, Artificial Sequence
  Description of Artificial Sequence: Synthetic polypeptide
EVQLVESGGGLVQPGGSLRLSCAASGFTLSSYSMHWVRQAPGKGLEWVAYISSYDSITDYADSVKGRFTISADTSKNTAYLQMNSLRAEDTAVYYCARPAVGHMAFDYWGQGTLVTVSSASTKGPSVFPLAPSSKSTSGGTAALGCLVKDYFPEPVTVSWNSGALTSGVHTFPAVLQSSGLYSLSSVVTVPSSSLGTQTYICNVNHKPSNTKVDKKVEPKSCDKTHTCPPCPAPEAAGGPSVFLFPPKPKDTLMISRTPEVTCVVVDVSHEDPEVKFNWYVDGVEVHNAKTKPREEQYNSTYRVVSVLTVLHQDWLNGKEYKCKVSNKALPASIEKTISKAKGQPREPQVYTLPPSREEMTKNQVSLWCLVKGFYPSDIAVEWESNGQPENNYKTTPPVLDSDGSFFLYSKLTVDKSRWQQGNVFSCSVMHEALHNHYTQKSLSLSPGKGGGSGGGSGGGSGGGSGSTGEVQLVESGGGLVQPGGSLRLSCAASGFDFTAYAMHWVRQAPGKGLEWVASIYPSGGYTAYADSVKGRFTISADTSKNTAYLQMNSLRAEDTAVYYCARRSYYFALDYWGQGTLVTVSSGGGGSDIQMTQSPSSLSASVGDRVTITCRASQSVSSAVAWYQQKPGKAPKLLIYSASSLYSGVPSRFSGSRSGTDFTLTISSLQPEDFATYYCQQYWAYYSPITFGQGTKVEIK

SEQ ID NO: 936 - protein, 701 aa, Artificial Sequence
  Description of Artificial Sequence: Synthetic polypeptide
EVQLVESGGGLVQPGGSLRLSCAASGFTLSSYSMHWVRQAPGKGLEWVAYISSYDSITDYADSVKGRFTISADTSKNTAYLQMNSLRAEDTAVYYCARPAVGHMAFDYWGQGTLVTVSSASTKGPSVFPLAPSSKSTSGGTAALGCLVKDYFPEPVTVSWNSGALTSGVHTFPAVLQSSGLYSLSSVVTVPSSSLGTQTYICNVNHKPSNTKVDKKVEPKSCDKTHTCPPCPAPEAAGGPSVFLFPPKPKDTLMISRTPEVTCVVVDVSHEDPEVKFNWYVDGVEVHNAKTKPREEQYNSTYRVVSVLTVLHQDWLNGKEYKCKVSNKALPASIEKTISKAKGQPREPQVYTLPPCREEMTKNQVSLWCLVKGFYPSDIAVEWESNGQPENNYKTTPPVLDSDGSFFLYSKLTVDKSRWQQGNVFSCSVMHEALHNHYTQKSLSLSPGKGGGSGGGSGGGSGGGSGSTGEVQLVESGGGLVQPGGSLRLSCAASGFDFTAYAMHWVRQAPGKGLEWVASIYPSGGYTAYADSVKGRFTISADTSKNTAYLQMNSLRAEDTAVYYCARRSYYFALDYWGQGTLVTVSSGGGGSDIQMTQSPSSLSASVGDRVTITCRASQSVSSAVAWYQQKPGKAPKLLIYSASSLYSGVPSRFSGSRSGTDFTLTISSLQPEDFATYYCQQYWAYYSPITFGQGTKVEIK

SEQ ID NO: 937 - protein, 732 aa, Artificial Sequence
  Description of Artificial Sequence: Synthetic polypeptide
MNLLLILTFVAAAVAEVQLVESGGGLVQPGGSLRLSCAASGFDFSSSSIHWVRQAPGKGLEWVASISSSYGYTYYADSVKGRFTISADTSKNTAYLQMNSLRAEDTAVYYCARSWAMDYWGQGTLVTVSSGGGGSDIQMTQSPSSLSASVGDRVTITCRASQSVSSAVAWYQQKPGKAPKLLIYSASDLYSGVPSRFSGSRSGTDFTLTISSLQPEDFATYYCQQYAGAGLITFGQGTKVEIKGGGGSGGGGSEPKSSDKTHTCPPCPAPEAAGGPSVFLFPPKPKDTLMISRTPEVTCVVVDVSHEDPEVKFNWYVDGVEVHNAKTKPREEQYNSTYRVVSVLTVLHQDWLNGKEYKCKVSNKALPASIEKTISKAKGQPREPQVYTLPPIRELMTSNQVSLSCAVKGFYPSDIAVEWESNGQPENNYKTTPPVLDSDGSFFLVSKLTVDKSRWQQGNVFSCSVMHEALHNHYTQKSLSLSPGKGGGSGGGSGGGSGGGSGSTGEVQLVESGGGLVQPGGSLRLSCAASGFTLSSYSMHWVRQAPGKGLEWVAYISSYDSITDYADSVKGRFTISADTSKNTAYLQMNSLRAEDTAVYYCARPAVGHMAFDYWGQGTLVTVSSASTKGPSVFPLAPSSKSTSGGTAALGCLVKDYFPEPVTVSWNSGALTSGVHTFPAVLQSSGLYSLSSVVTVPSSSLGTQTYICNVNHKPSNTKVDKKVEPKSCDKTHT

SEQ ID NO: 938 - protein, 732 aa, Artificial Sequence
  Description of Artificial Sequence: Synthetic polypeptide
MNLLLILTFVAAAVAEVQLVESGGGLVQPGGSLRLSCAASGFDFSSSSIHWVRQAPGKGLEWVASISSSYGYTYYADSVKGRFTISADTSKNTAYLQMNSLRAEDTAVYYCARSWAMDYWGQGTLVTVSSGGGGSDIQMTQSPSSLSASVGDRVTITCRASQSVSSAVAWYQQKPGKAPKLLIYSASDLYSGVPSRFSGSRSGTDFTLTISSLQPEDFATYYCQQYAGAGLITFGQGTKVEIKGGGGSGGGGSEPKSSDKTHTCPPCPAPEAAGGPSVFLFPPKPKDTLMISRTPEVTCVVVDVSHEDPEVKFNWYVDGVEVHNAKTKPREEQYNSTYRVVSVLTVLHQDWLNGKEYKCKVSNKALPASIEKTISKAKGQPREPQVYTLPPSREEMTKNQVSLSCAVKGFYPSDIAVEWESNGQPENNYKTTPPVLDSDGSFFLVSKLTVDKSRWQQGNVFSCSVMHEALHNHYTQKSLSLSPGKGGGSGGGSGGGSGGGSGSTGEVQLVESGGGLVQPGGSLRLSCAASGFTLSSYSMHWVRQAPGKGLEWVAYISSYDSITDYADSVKGRFTISADTSKNTAYLQMNSLRAEDTAVYYCARPAVGHMAFDYWGQGTLVTVSSASTKGPSVFPLAPSSKSTSGGTAALGCLVKDYFPEPVTVSWNSGALTSGVHTFPAVLQSSGLYSLSSVVTVPSSSLGTQTYICNVNHKPSNTKVDKKVEPKSCDKTHT

SEQ ID NO: 939 - protein, 732 aa, Artificial Sequence
  Description of Artificial Sequence: Synthetic polypeptide
MNLLLILTFVAAAVAEVQLVESGGGLVQPGGSLRLSCAASGFDFSSSSIHWVRQAPGKGLEWVASISSSYGYTYYADSVKGRFTISADTSKNTAYLQMNSLRAEDTAVYYCARSWAMDYWGQGTLVTVSSGGGGSDIQMTQSPSSLSASVGDRVTITCRASQSVSSAVAWYQQKPGKAPKLLIYSASDLYSGVPSRFSGSRSGTDFTLTISSLQPEDFATYYCQQYAGAGLITFGQGTKVEIKGGGGSGGGGSEPKSSDKTHTCPPCPAPEAAGGPSVFLFPPKPKDTLMISRTPEVTCVVVDVSHEDPEVKFNWYVDGVEVHNAKTKPREEQYNSTYRVVSVLTVLHQDWLNGKEYKCKVSNKALPASIEKTISKAKGQPREPQVCTLPPSREEMTKNQVSLSCAVKGFYPSDIAVEWESNGQPENNYKTTPPVLDSDGSFFLVSKLTVDKSRWQQGNVFSCSVMHEALHNHYTQKSLSLSPGKGGGSGGGSGGGSGGGSGSTGEVQLVESGGGLVQPGGSLRLSCAASGFTLSSYSMHWVRQAPGKGLEWVAYISSYDSITDYADSVKGRFTISADTSKNTAYLQMNSLRAEDTAVYYCARPAVGHMAFDYWGQGTLVTVSSASTKGPSVFPLAPSSKSTSGGTAALGCLVKDYFPEPVTVSWNSGALTSGVHTFPAVLQSSGLYSLSSVVTVPSSSLGTQTYICNVNHKPSNTKVDKKVEPKSCDKTHT

SEQ ID NO: 940 - protein, 717 aa, Artificial Sequence
  Description of Artificial Sequence: Synthetic polypeptide
EVQLVESGGGLVQPGGSLRLSCAASGFDFSSSSIHWVRQAPGKGLEWVASISSSYGYTYYADSVKGRFTISADTSKNTAYLQMNSLRAEDTAVYYCARSWAMDYWGQGTLVTVSSGGGGSDIQMTQSPSSLSASVGDRVTITCRASQSVSSAVAWYQQKPGKAPKLLIYSASDLYSGVPSRFSGSRSGTDFTLTISSLQPEDFATYYCQQYAGAGLITFGQGTKVEIKGGGGSGGGGSEPKSSDKTHTCPPCPAPELLGGPSVFLFPPKPKDTLMISRTPEVTCVVVAVSHEDPEVKFNWYVDGVEVHNAKTKPREEQYGSTYRVVSVLTVLHQDWLNGKEYKCKVSNKALPAPIEKTISKAKGQPREPQVYTLPPIRELMTSNQVSLSCAVKGFYPSDIAVEWESNGQPENNYKTTPPVLDSDGSFFLVSKLTVDKSRWQQGNVFSCSVMHEALHNHYTQKSLSLSPGKGGGSGGGSGGGSGGGSGSTGEVQLVESGGGLVQPGGSLRLSCAASGFTLSSYSMHWVRQAPGKGLEWVAYISSYDSITDYADSVKGRFTISADTSKNTAYLQMNSLRAEDTAVYYCARPAVGHMAFDYWGQGTLVTVSSASTKGPSVFPLAPSSKSTSGGTAALGCLVKDYFPEPVTVSWNSGALTSGVHTFPAVLQSSGLYSLSSVVTVPSSSLGTQTYICNVNHKPSNTKVDKKVEPKSCDKTHT

SEQ ID NO: 941 - protein, 717 aa, Artificial Sequence
  Description of Artificial Sequence: Synthetic polypeptide
EVQLVESGGGLVQPGGSLRLSCAASGFDFSSSSIHWVRQAPGKGLEWVASISSSYGYTYYADSVKGRFTISADTSKNTAYLQMNSLRAEDTAVYYCARSWAMDYWGQGTLVTVSSGGGGSDIQMTQSPSSLSASVGDRVTITCRASQSVSSAVAWYQQKPGKAPKLLIYSASDLYSGVPSRFSGSRSGTDFTLTISSLQPEDFATYYCQQYAGAGLITFGQGTKVEIKGGGGSGGGGSEPKSSDKTHTCPPCPAPEAAGGPSVFLFPPKPKDTLMISRTPEVTCVVVDVSHEDPEVKFNWYVDGVEVHNAKTKPREEQYNSTYRVVSVLTVLHQDWLNGKEYKCKVSNKALPASIEKTISKAKGQPREPQVYTLPPIRELMTSNQVSLSCAVKGFYPSDIAVEWESNGQPENNYKTTPPVLDSDGSFFLVSKLTVDKSRWQQGNVFSCSVMHEALHNHYTQKSLSLSPGKGGGSGGGSGGGSGGGSGSTGEVQLVESGGGLVQPGGSLRLSCAASGFTLSSYSMHWVRQAPGKGLEWVAYISSYDSITDYADSVKGRFTISADTSKNTAYLQMNSLRAEDTAVYYCARPAVGHMAFDYWGQGTLVTVSSASTKGPSVFPLAPSSKSTSGGTAALGCLVKDYFPEPVTVSWNSGALTSGVHTFPAVLQSSGLYSLSSVVTVPSSSLGTQTYICNVNHKPSNTKVDKKVEPKSCDKTHT

SEQ ID NO: 942 - protein, 717 aa, Artificial Sequence
  Description of Artificial Sequence: Synthetic polypeptide
EVQLVESGGGLVQPGGSLRLSCAASGFDFSSSSIHWVRQAPGKGLEWVASISSSYGYTYYADSVKGRFTISADTSKNTAYLQMNSLRAEDTAVYYCARSWAMDYWGQGTLVTVSSGGGGSDIQMTQSPSSLSASVGDRVTITCRASQSVSSAVAWYQQKPGKAPKLLIYSASDLYSGVPSRFSGSRSGTDFTLTISSLQPEDFATYYCQQYAGAGLITFGQGTKVEIKGGGGSGGGGSEPKSSDKTHTCPPCPAPEAAGGPSVFLFPPKPKDTLMISRTPEVTCVVVDVSHEDPEVKFNWYVDGVEVHNAKTKPREEQYNSTYRVVSVLTVLHQDWLNGKEYKCKVSNKALPASIEKTISKAKGQPREPQVYTLPPSREEMTKNQVSLSCAVKGFYPSDIAVEWESNGQPENNYKTTPPVLDSDGSFFLVSKLTVDKSRWQQGNVFSCSVMHEALHNHYTQKSLSLSPGKGGGSGGGSGGGSGGGSGSTGEVQLVESGGGLVQPGGSLRLSCAASGFTLSSYSMHWVRQAPGKGLEWVAYISSYDSITDYADSVKGRFTISADTSKNTAYLQMNSLRAEDTAVYYCARPAVGHMAFDYWGQGTLVTVSSASTKGPSVFPLAPSSKSTSGGTAALGCLVKDYFPEPVTVSWNSGALTSGVHTFPAVLQSSGLYSLSSVVTVPSSSLGTQTYICNVNHKPSNTKVDKKVEPKSCDKTHT

SEQ ID NO: 943 - protein, 717 aa, Artificial Sequence
  Description of Artificial Sequence: Synthetic polypeptide
EVQLVESGGGLVQPGGSLRLSCAASGFDFSSSSIHWVRQAPGKGLEWVASISSSYGYTYYADSVKGRFTISADTSKNTAYLQMNSLRAEDTAVYYCARSWAMDYWGQGTLVTVSSGGGGSDIQMTQSPSSLSASVGDRVTITCRASQSVSSAVAWYQQKPGKAPKLLIYSASDLYSGVPSRFSGSRSGTDFTLTISSLQPEDFATYYCQQYAGAGLITFGQGTKVEIKGGGGSGGGGSEPKSSDKTHTCPPCPAPEAAGGPSVFLFPPKPKDTLMISRTPEVTCVVVDVSHEDPEVKFNWYVDGVEVHNAKTKPREEQYNSTYRVVSVLTVLHQDWLNGKEYKCKVSNKALPASIEKTISKAKGQPREPQVCTLPPSREEMTKNQVSLSCAVKGFYPSDIAVEWESNGQPENNYKTTPPVLDSDGSFFLVSKLTVDKSRWQQGNVFSCSVMHEALHNHYTQKSLSLSPGKGGGSGGGSGGGSGGGSGSTGEVQLVESGGGLVQPGGSLRLSCAASGFTLSSYSMHWVRQAPGKGLEWVAYISSYDSITDYADSVKGRFTISADTSKNTAYLQMNSLRAEDTAVYYCARPAVGHMAFDYWGQGTLVTVSSASTKGPSVFPLAPSSKSTSGGTAALGCLVKDYFPEPVTVSWNSGALTSGVHTFPAVLQSSGLYSLSSVVTVPSSSLGTQTYICNVNHKPSNTKVDKKVEPKSCDKTHT

SEQ ID NO: 944 - protein, 736 aa, Artificial Sequence
  Description of Artificial Sequence: Synthetic polypeptide
MNLLLILTFVAAAVAEVQLVESGGGLVQPGGSLRLSCAASGFDFTAYAMHWVRQAPGKGLEWVASIYPSGGYTAYADSVKGRFTISADTSKNTAYLQMNSLRAEDTAVYYCARRSYYFALDYWGQGTLVTVSSGGGGSDIQMTQSPSSLSASVGDRVTITCRASQSVSSAVAWYQQKPGKAPKLLIYSASSLYSGVPSRFSGSRSGTDFTLTISSLQPEDFATYYCQQYWAYYSPITFGQGTKVEIKGGGGSGGGGSEPKSSDKTHTCPPCPAPELLGGPSVFLFPPKPKDTLMISRTPEVTCVVVAVSHEDPEVKFNWYVDGVEVHNAKTKPREEQYGSTYRVVSVLTVLHQDWLNGKEYKCKVSNKALPAPIEKTISKAKGQPREPMVFDLPPSREEMTKNQVSLWCMVKGFYPSDIAVEWESNGQPENNYKTTPPVLDSDGSFFLYSKLTVDKSRWQQGNVFSCSVMHEALHNHYTQKSLSLSPGKGGGSGGGSGGGSGGGSGSTGEVQLVESGGGLVQPGGSLRLSCAASGFTLSSYSMHWVRQAPGKGLEWVAYISSYDSITDYADSVKGRFTISADTSKNTAYLQMNSLRAEDTAVYYCARPAVGHMAFDYWGQGTLVTVSSASTKGPSVFPLAPSSKSTSGGTAALGCLVKDYFPEPVTVSWNSGALTSGVHTFPAVLQSSGLYSLSSVVTVPSSSLGTQTYICNVNHKPSNTKVDKKVEPKSCDKTHT

SEQ ID NO: 945 - protein, 736 aa, Artificial Sequence
  Description of Artificial Sequence: Synthetic polypeptide
MNLLLILTFVAAAVAEVQLVESGGGLVQPGGSLRLSCAASGFDFTAYAMHWVRQAPGKGLEWVASIYPSGGYTAYADSVKGRFTISADTSKNTAYLQMNSLRAEDTAVYYCARRSYYFALDYWGQGTLVTVSSGGGGSDIQMTQSPSSLSASVGDRVTITCRASQSVSSAVAWYQQKPGKAPKLLIYSASSLYSGVPSRFSGSRSGTDFTLTISSLQPEDFATYYCQQYWAYYSPITFGQGTKVEIKGGGGSGGGGSEPKSSDKTHTCPPCPAPEAAGGPSVFLFPPKPKDTLMISRTPEVTCVVVDVSHEDPEVKFNWYVDGVEVHNAKTKPREEQYNSTYRVVSVLTVLHQDWLNGKEYKCKVSNKALPASIEKTISKAKGQPREPMVFDLPPSREEMTKNQVSLWCMVKGFYPSDIAVEWESNGQPENNYKTTPPVLDSDGSFFLYSKLTVDKSRWQQGNVFSCSVMHEALHNHYTQKSLSLSPGKGGGSGGGSGGGSGGGSGSTGEVQLVESGGGLVQPGGSLRLSCAASGFTLSSYSMHWVRQAPGKGLEWVAYISSYDSITDYADSVKGRFTISADTSKNTAYLQMNSLRAEDTAVYYCARPAVGHMAFDYWGQGTLVTVSSASTKGPSVFPLAPSSKSTSGGTAALGCLVKDYFPEPVTVSWNSGALTSGVHTFPAVLQSSGLYSLSSVVTVPSSSLGTQTYICNVNHKPSNTKVDKKVEPKSCDKTHT

SEQ ID NO: 946 - protein, 736 aa, Artificial Sequence
  Description of Artificial Sequence: Synthetic polypeptide
MNLLLILTFVAAAVAEVQLVESGGGLVQPGGSLRLSCAASGFDFTAYAMHWVRQAPGKGLEWVASIYPSGGYTAYADSVKGRFTISADTSKNTAYLQMNSLRAEDTAVYYCARRSYYFALDYWGQGTLVTVSSGGGGSDIQMTQSPSSLSASVGDRVTITCRASQSVSSAVAWYQQKPGKAPKLLIYSASSLYSGVPSRFSGSRSGTDFTLTISSLQPEDFATYYCQQYWAYYSPITFGQGTKVEIKGGGGSGGGGSEPKSSDKTHTCPPCPAPEAAGGPSVFLFPPKPKDTLMISRTPEVTCVVVDVSHEDPEVKFNWYVDGVEVHNAKTKPREEQYNSTYRVVSVLTVLHQDWLNGKEYKCKVSNKALPASIEKTISKAKGQPREPQVYTLPPSREEMTKNQVSLWCLVKGFYPSDIAVEWESNGQPENNYKTTPPVLDSDGSFFLYSKLTVDKSRWQQGNVFSCSVMHEALHNHYTQKSLSLSPGKGGGSGGGSGGGSGGGSGSTGEVQLVESGGGLVQPGGSLRLSCAASGFTLSSYSMHWVRQAPGKGLEWVAYISSYDSITDYADSVKGRFTISADTSKNTAYLQMNSLRAEDTAVYYCARPAVGHMAFDYWGQGTLVTVSSASTKGPSVFPLAPSSKSTSGGTAALGCLVKDYFPEPVTVSWNSGALTSGVHTFPAVLQSSGLYSLSSVVTVPSSSLGTQTYICNVNHKPSNTKVDKKVEPKSCDKTHT

SEQ ID NO: 947 - protein, 736 aa, Artificial Sequence
  Description of Artificial Sequence: Synthetic polypeptide
MNLLLILTFVAAAVAEVQLVESGGGLVQPGGSLRLSCAASGFDFTAYAMHWVRQAPGKGLEWVASIYPSGGYTAYADSVKGRFTISADTSKNTAYLQMNSLRAEDTAVYYCARRSYYFALDYWGQGTLVTVSSGGGGSDIQMTQSPSSLSASVGDRVTITCRASQSVSSAVAWYQQKPGKAPKLLIYSASSLYSGVPSRFSGSRSGTDFTLTISSLQPEDFATYYCQQYWAYYSPITFGQGTKVEIKGGGGSGGGGSEPKSSDKTHTCPPCPAPEAAGGPSVFLFPPKPKDTLMISRTPEVTCVVVDVSHEDPEVKFNWYVDGVEVHNAKTKPREEQYNSTYRVVSVLTVLHQDWLNGKEYKCKVSNKALPASIEKTISKAKGQPREPQVYTLPPCREEMTKNQVSLWCLVKGFYPSDIAVEWESNGQPENNYKTTPPVLDSDGSFFLYSKLTVDKSRWQQGNVFSCSVMHEALHNHYTQKSLSLSPGKGGGSGGGSGGGSGGGSGSTGEVQLVESGGGLVQPGGSLRLSCAASGFTLSSYSMHWVRQAPGKGLEWVAYISSYDSITDYADSVKGRFTISADTSKNTAYLQMNSLRAEDTAVYYCARPAVGHMAFDYWGQGTLVTVSSASTKGPSVFPLAPSSKSTSGGTAALGCLVKDYFPEPVTVSWNSGALTSGVHTFPAVLQSSGLYSLSSVVTVPSSSLGTQTYICNVNHKPSNTKVDKKVEPKSCDKTHT

SEQ ID NO: 948 - protein, 721 aa, Artificial Sequence
  Description of Artificial Sequence: Synthetic polypeptide
EVQLVESGGGLVQPGGSLRLSCAASGFDFTAYAMHWVRQAPGKGLEWVASIYPSGGYTAYADSVKGRFTISADTSKNTAYLQMNSLRAEDTAVYYCARRSYYFALDYWGQGTLVTVSSGGGGSDIQMTQSPSSLSASVGDRVTITCRASQSVSSAVAWYQQKPGKAPKLLIYSASSLYSGVPSRFSGSRSGTDFTLTISSLQPEDFATYYCQQYWAYYSPITFGQGTKVEIKGGGGSGGGGSEPKSSDKTHTCPPCPAPELLGGPSVFLFPPKPKDTLMISRTPEVTCVVVAVSHEDPEVKFNWYVDGVEVHNAKTKPREEQYGSTYRVVSVLTVLHQDWLNGKEYKCKVSNKALPAPIEKTISKAKGQPREPMVFDLPPSREEMTKNQVSLWCMVKGFYPSDIAVEWESNGQPENNYKTTPPVLDSDGSFFLYSKLTVDKSRWQQGNVFSCSVMHEALHNHYTQKSLSLSPGKGGGSGGGSGGGSGGGSGSTGEVQLVESGGGLVQPGGSLRLSCAASGFTLSSYSMHWVRQAPGKGLEWVAYISSYDSITDYADSVKGRFTISADTSKNTAYLQMNSLRAEDTAVYYCARPAVGHMAFDYWGQGTLVTVSSASTKGPSVFPLAPSSKSTSGGTAALGCLVKDYFPEPVTVSWNSGALTSGVHTFPAVLQSSGLYSLSSVVTVPSSSLGTQTYICNVNHKPSNTKVDKKVEPKSCDKTHT

SEQ ID NO: 949 - protein, 721 aa, Artificial Sequence
  Description of Artificial Sequence: Synthetic polypeptide
EVQLVESGGGLVQPGGSLRLSCAASGFDFTAYAMHWVRQAPGKGLEWVASIYPSGGYTAYADSVKGRFTISADTSKNTAYLQMNSLRAEDTAVYYCARRSYYFALDYWGQGTLVTVSSGGGGSDIQMTQSPSSLSASVGDRVTITCRASQSVSSAVAWYQQKPGKAPKLLIYSASSLYSGVPSRFSGSRSGTDFTLTISSLQPEDFATYYCQQYWAYYSPITFGQGTKVEIKGGGGSGGGGSEPKSSDKTHTCPPCPAPEAAGGPSVFLFPPKPKDTLMISRTPEVTCVVVDVSHEDPEVKFNWYVDGVEVHNAKTKPREEQYNSTYRVVSVLTVLHQDWLNGKEYKCKVSNKALPASIEKTISKAKGQPREPMVFDLPPSREEMTKNQVSLWCMVKGFYPSDIAVEWESNGQPENNYKTTPPVLDSDGSFFLYSKLTVDKSRWQQGNVFSCSVMHEALHNHYTQKSLSLSPGKGGGSGGGSGGGSGGGSGSTGEVQLVESGGGLVQPGGSLRLSCAASGFTLSSYSMHWVRQAPGKGLEWVAYISSYDSITDYADSVKGRFTISADTSKNTAYLQMNSLRAEDTAVYYCARPAVGHMAFDYWGQGTLVTVSSASTKGPSVFPLAPSSKSTSGGTAALGCLVKDYFPEPVTVSWNSGALTSGVHTFPAVLQSSGLYSLSSVVTVPSSSLGTQTYICNVNHKPSNTKVDKKVEPKSCDKTHT

SEQ ID NO: 950 - protein, 721 aa, Artificial Sequence
  Description of Artificial Sequence: Synthetic polypeptide
EVQLVESGGGLVQPGGSLRLSCAASGFDFTAYAMHWVRQAPGKGLEWVASIYPSGGYTAYADSVKGRFTISADTSKNTAYLQMNSLRAEDTAVYYCARRSYYFALDYWGQGTLVTVSSGGGGSDIQMTQSPSSLSASVGDRVTITCRASQSVSSAVAWYQQKPGKAPKLLIYSASSLYSGVPSRFSGSRSGTDFTLTISSLQPEDFATYYCQQYWAYYSPITFGQGTKVEIKGGGGSGGGGSEPKSSDKTHTCPPCPAPEAAGGPSVFLFPPKPKDTLMISRTPEVTCVVVDVSHEDPEVKFNWYVDGVEVHNAKTKPREEQYNSTYRVVSVLTVLHQDWLNGKEYKCKVSNKALPASIEKTISKAKGQPREPQVYTLPPSREEMTKNQVSLWCLVKGFYPSDIAVEWESNGQPENNYKTTPPVLDSDGSFFLYSKLTVDKSRWQQGNVFSCSVMHEALHNHYTQKSLSLSPGKGGGSGGGSGGGSGGGSGSTGEVQLVESGGGLVQPGGSLRLSCAASGFTLSSYSMHWVRQAPGKGLEWVAYISSYDSITDYADSVKGRFTISADTSKNTAYLQMNSLRAEDTAVYYCARPAVGHMAFDYWGQGTLVTVSSASTKGPSVFPLAPSSKSTSGGTAALGCLVKDYFPEPVTVSWNSGALTSGVHTFPAVLQSSGLYSLSSVVTVPSSSLGTQTYICNVNHKPSNTKVDKKVEPKSCDKTHT

SEQ ID NO: 951 - protein, 721 aa, Artificial Sequence
  Description of Artificial Sequence: Synthetic polypeptide
EVQLVESGGGLVQPGGSLRLSCAASGFDFTAYAMHWVRQAPGKGLEWVASIYPSGGYTAYADSVKGRFTISADTSKNTAYLQMNSLRAEDTAVYYCARRSYYFALDYWGQGTLVTVSSGGGGSDIQMTQSPSSLSASVGDRVTITCRASQSVSSAVAWYQQKPGKAPKLLIYSASSLYSGVPSRFSGSRSGTDFTLTISSLQPEDFATYYCQQYWAYYSPITFGQGTKVEIKGGGGSGGGGSEPKSSDKTHTCPPCPAPEAAGGPSVFLFPPKPKDTLMISRTPEVTCVVVDVSHEDPEVKFNWYVDGVEVHNAKTKPREEQYNSTYRVVSVLTVLHQDWLNGKEYKCKVSNKALPASIEKTISKAKGQPREPQVYTLPPCREEMTKNQVSLWCLVKGFYPSDIAVEWESNGQPENNYKTTPPVLDSDGSFFLYSKLTVDKSRWQQGNVFSCSVMHEALHNHYTQKSLSLSPGKGGGSGGGSGGGSGGGSGSTGEVQLVESGGGLVQPGGSLRLSCAASGFTLSSYSMHWVRQAPGKGLEWVAYISSYDSITDYADSVKGRFTISADTSKNTAYLQMNSLRAEDTAVYYCARPAVGHMAFDYWGQGTLVTVSSASTKGPSVFPLAPSSKSTSGGTAALGCLVKDYFPEPVTVSWNSGALTSGVHTFPAVLQSSGLYSLSSVVTVPSSSLGTQTYICNVNHKPSNTKVDKKVEPKSCDKTHT

SEQ ID NO: 952 - protein, 214 aa, Artificial Sequence
  Description of Artificial Sequence: Synthetic polypeptide
DIQMTQSPSSLSASVGDRVTITCRASQSVSSAVAWYQQKPGKAPKLLIYSASSLYSGVPSRFSGSRSGTDFTLTISSLQPEDFATYYCQQWYNAPITFGQGTKVEIKRTVAAPSVFIFPPSDEQLKSGTASVVCLLNNFYPREAKVQWKVDNALQSGNSQESVTEQDSKDSTYSLSSTLTLSKADYEKHKVYACEVTHQGLSSPVTKSFNRGEC

SEQ ID NO: 953 - protein, 713 aa, Artificial Sequence
  Description of Artificial Sequence: Synthetic polypeptide
MNLLLILTFVAAAVAEVQLVESGGGLVQPGGSLRLSCAASGFTSDFYFIHWVRQAPGKGLEWVATIYPFIGNTYYADSVKGRFTISADTSKNTAYLQMNSLRAEDTAVYYCARAFPGSYHPFDYWGQGTLVTVSSASTKGPSVFPLAPSSKSTSGGTAALGCLVKDYFPEPVTVSWNSGALTSGVHTFPAVLQSSGLYSLSSVVTVPSSSLGTQTYICNVNHKPSNTKVDKKVEPKSCDKTHTCPPCPAPELLGGPSVFLFPPKPKDTLMISRTPEVTCVVVAVSHEDPEVKFNWYVDGVEVHNAKTKPREEQYGSTYRVVSVLTVLHQDWLNGKEYKCKVSNKALPAPIEKTISKAKGQPREPQVYTLPPIRELMTSNQVSLSCAVKGFYPSDIAVEWESNGQPENNYKTTPPVLDSDGSFFLVSKLTVDKSRWQQGNVFSCSVMHEALHNHYTQKSLSLSPGKGGGSGGGSGGGSGGGSGSTGEVQLVESGGGLVQPGGSLRLSCAASGFDFSSSSIHWVRQAPGKGLEWVASISSSYGYTYYADSVKGRFTISADTSKNTAYLQMNSLRAEDTAVYYCARSWAMDYWGQGTLVTVSSGGGGSDIQMTQSPSSLSASVGDRVTITCRASQSVSSAVAWYQQKPGKAPKLLIYSASDLYSGVPSRFSGSRSGTDFTLTISSLQPEDFATYYCQQYAGAGLITFGQGTKVEIK

SEQ ID NO: 954 - protein, 713 aa, Artificial Sequence
  Description of Artificial Sequence: Synthetic polypeptide
MNLLLILTFVAAAVAEVQLVESGGGLVQPGGSLRLSCAASGFTSDFYFIHWVRQAPGKGLEWVATIYPFIGNTYYADSVKGRFTISADTSKNTAYLQMNSLRAEDTAVYYCARAFPGSYHPFDYWGQGTLVTVSSASTKGPSVFPLAPSSKSTSGGTAALGCLVKDYFPEPVTVSWNSGALTSGVHTFPAVLQSSGLYSLSSVVTVPSSSLGTQTYICNVNHKPSNTKVDKKVEPKSCDKTHTCPPCPAPEAAGGPSVFLFPPKPKDTLMISRTPEVTCVVVDVSHEDPEVKFNWYVDGVEVHNAKTKPREEQYNSTYRVVSVLTVLHQDWLNGKEYKCKVSNKALPASIEKTISKAKGQPREPQVYTLPPIRELMTSNQVSLSCAVKGFYPSDIAVEWESNGQPENNYKTTPPVLDSDGSFFLVSKLTVDKSRWQQGNVFSCSVMHEALHNHYTQKSLSLSPGKGGGSGGGSGGGSGGGSGSTGEVQLVESGGGLVQPGGSLRLSCAASGFDFSSSSIHWVRQAPGKGLEWVASISSSYGYTYYADSVKGRFTISADTSKNTAYLQMNSLRAEDTAVYYCARSWAMDYWGQGTLVTVSSGGGGSDIQMTQSPSSLSASVGDRVTITCRASQSVSSAVAWYQQKPGKAPKLLIYSASDLYSGVPSRFSGSRSGTDFTLTISSLQPEDFATYYCQQYAGAGLITFGQGTKVEIK

SEQ ID NO: 955 - protein, 713 aa, Artificial Sequence
  Description of Artificial Sequence: Synthetic polypeptide
MNLLLILTFVAAAVAEVQLVESGGGLVQPGGSLRLSCAASGFTSDFYFIHWVRQAPGKGLEWVATIYPFIGNTYYADSVKGRFTISADTSKNTAYLQMNSLRAEDTAVYYCARAFPGSYHPFDYWGQGTLVTVSSASTKGPSVFPLAPSSKSTSGGTAALGCLVKDYFPEPVTVSWNSGALTSGVHTFPAVLQSSGLYSLSSVVTVPSSSLGTQTYICNVNHKPSNTKVDKKVEPKSCDKTHTCPPCPAPEAAGGPSVFLFPPKPKDTLMISRTPEVTCVVVDVSHEDPEVKFNWYVDGVEVHNAKTKPREEQYNSTYRVVSVLTVLHQDWLNGKEYKCKVSNKALPASIEKTISKAKGQPREPQVYTLPPSREEMTKNQVSLSCAVKGFYPSDIAVEWESNGQPENNYKTTPPVLDSDGSFFLVSKLTVDKSRWQQGNVFSCSVMHEALHNHYTQKSLSLSPGKGGGSGGGSGGGSGGGSGSTGEVQLVESGGGLVQPGGSLRLSCAASGFDFSSSSIHWVRQAPGKGLEWVASISSSYGYTYYADSVKGRFTISADTSKNTAYLQMNSLRAEDTAVYYCARSWAMDYWGQGTLVTVSSGGGGSDIQMTQSPSSLSASVGDRVTITCRASQSVSSAVAWYQQKPGKAPKLLIYSASDLYSGVPSRFSGSRSGTDFTLTISSLQPEDFATYYCQQYAGAGLITFGQGTKVEIK

SEQ ID NO: 956 - protein, 713 aa, Artificial Sequence
  Description of Artificial Sequence: Synthetic polypeptide
MNLLLILTFVAAAVAEVQLVESGGGLVQPGGSLRLSCAASGFTSDFYFIHWVRQAPGKGLEWVATIYPFIGNTYYADSVKGRFTISADTSKNTAYLQMNSLRAEDTAVYYCARAFPGSYHPFDYWGQGTLVTVSSASTKGPSVFPLAPSSKSTSGGTAALGCLVKDYFPEPVTVSWNSGALTSGVHTFPAVLQSSGLYSLSSVVTVPSSSLGTQTYICNVNHKPSNTKVDKKVEPKSCDKTHTCPPCPAPEAAGGPSVFLFPPKPKDTLMISRTPEVTCVVVDVSHEDPEVKFNWYVDGVEVHNAKTKPREEQYNSTYRVVSVLTVLHQDWLNGKEYKCKVSNKALPASIEKTISKAKGQPREPQVCTLPPSREEMTKNQVSLSCAVKGFYPSDIAVEWESNGQPENNYKTTPPVLDSDGSFFLVSKLTVDKSRWQQGNVFSCSVMHEALHNHYTQKSLSLSPGKGGGSGGGSGGGSGGGSGSTGEVQLVESGGGLVQPGGSLRLSCAASGFDFSSSSIHWVRQAPGKGLEWVASISSSYGYTYYADSVKGRFTISADTSKNTAYLQMNSLRAEDTAVYYCARSWAMDYWGQGTLVTVSSGGGGSDIQMTQSPSSLSASVGDRVTITCRASQSVSSAVAWYQQKPGKAPKLLIYSASDLYSGVPSRFSGSRSGTDFTLTISSLQPEDFATYYCQQYAGAGLITFGQGTKVEIK

SEQ ID NO: 957 - protein, 698 aa, Artificial Sequence
  Description of Artificial Sequence: Synthetic polypeptide
EVQLVESGGGLVQPGGSLRLSCAASGFTSDFYFIHWVRQAPGKGLEWVATIYPFIGNTYYADSVKGRFTISADTSKNTAYLQMNSLRAEDTAVYYCARAFPGSYHPFDYWGQGTLVTVSSASTKGPSVFPLAPSSKSTSGGTAALGCLVKDYFPEPVTVSWNSGALTSGVHTFPAVLQSSGLYSLSSVVTVPSSSLGTQTYICNVNHKPSNTKVDKKVEPKSCDKTHTCPPCPAPELLGGPSVFLFPPKPKDTLMISRTPEVTCVVVAVSHEDPEVKFNWYVDGVEVHNAKTKPREEQYGSTYRVVSVLTVLHQDWLNGKEYKCKVSNKALPAPIEKTISKAKGQPREPQVYTLPPIRELMTSNQVSLSCAVKGFYPSDIAVEWESNGQPENNYKTTPPVLDSDGSFFLVSKLTVDKSRWQQGNVFSCSVMHEALHNHYTQKSLSLSPGKGGGSGGGSGGGSGGGSGSTGEVQLVESGGGLVQPGGSLRLSCAASGFDFSSSSIHWVRQAPGKGLEWVASISSSYGYTYYADSVKGRFTISADTSKNTAYLQMNSLRAEDTAVYYCARSWAMDYWGQGTLVTVSSGGGGSDIQMTQSPSSLSASVGDRVTITCRASQSVSSAVAWYQQKPGKAPKLLIYSASDLYSGVPSRFSGSRSGTDFTLTISSLQPEDFATYYCQQYAGAGLITFGQGTKVEIK

SEQ ID NO: 958 - protein, 698 aa, Artificial Sequence
  Description of Artificial Sequence: Synthetic polypeptide
EVQLVESGGGLVQPGGSLRLSCAASGFTSDFYFIHWVRQAPGKGLEWVATIYPFIGNTYYADSVKGRFTISADTSKNTAYLQMNSLRAEDTAVYYCARAFPGSYHPFDYWGQGTLVTVSSASTKGPSVFPLAPSSKSTSGGTAALGCLVKDYFPEPVTVSWNSGALTSGVHTFPAVLQSSGLYSLSSVVTVPSSSLGTQTYICNVNHKPSNTKVDKKVEPKSCDKTHTCPPCPAPEAAGGPSVFLFPPKPKDTLMISRTPEVTCVVVDVSHEDPEVKFNWYVDGVEVHNAKTKPREEQYNSTYRVVSVLTVLHQDWLNGKEYKCKVSNKALPASIEKTISKAKGQPREPQVYTLPPIRELMTSNQVSLSCAVKGFYPSDIAVEWESNGQPENNYKTTPPVLDSDGSFFLVSKLTVDKSRWQQGNVFSCSVMHEALHNHYTQKSLSLSPGKGGGSGGGSGGGSGGGSGSTGEVQLVESGGGLVQPGGSLRLSCAASGFDFSSSSIHWVRQAPGKGLEWVASISSSYGYTYYADSVKGRFTISADTSKNTAYLQMNSLRAEDTAVYYCARSWAMDYWGQGTLVTVSSGGGGSDIQMTQSPSSLSASVGDRVTITCRASQSVSSAVAWYQQKPGKAPKLLIYSASDLYSGVPSRFSGSRSGTDFTLTISSLQPEDFATYYCQQYAGAGLITFGQGTKVEIK

SEQ ID NO: 959 - protein, 698 aa, Artificial Sequence
  Description of Artificial Sequence: Synthetic polypeptide
EVQLVESGGGLVQPGGSLRLSCAASGFTSDFYFIHWVRQAPGKGLEWVATIYPFIGNTYYADSVKGRFTISADTSKNTAYLQMNSLRAEDTAVYYCARAFPGSYHPFDYWGQGTLVTVSSASTKGPSVFPLAPSSKSTSGGTAALGCLVKDYFPEPVTVSWNSGALTSGVHTFPAVLQSSGLYSLSSVVTVPSSSLGTQTYICNVNHKPSNTKVDKKVEPKSCDKTHTCPPCPAPEAAGGPSVFLFPPKPKDTLMISRTPEVTCVVVDVSHEDPEVKFNWYVDGVEVHNAKTKPREEQYNSTYRVVSVLTVLHQDWLNGKEYKCKVSNKALPASIEKTISKAKGQPREPQVYTLPPSREEMTKNQVSLSCAVKGFYPSDIAVEWESNGQPENNYKTTPPVLDSDGSFFLVSKLTVDKSRWQQGNVFSCSVMHEALHNHYTQKSLSLSPGKGGGSGGGSGGGSGGGSGSTGEVQLVESGGGLVQPGGSLRLSCAASGFDFSSSSIHWVRQAPGKGLEWVASISSSYGYTYYADSVKGRFTISADTSKNTAYLQMNSLRAEDTAVYYCARSWAMDYWGQGTLVTVSSGGGGSDIQMTQSPSSLSASVGDRVTITCRASQSVSSAVAWYQQKPGKAPKLLIYSASDLYSGVPSRFSGSRSGTDFTLTISSLQPEDFATYYCQQYAGAGLITFGQGTKVEIK

SEQ ID NO: 960 - protein, 698 aa, Artificial Sequence
  Description of Artificial Sequence: Synthetic polypeptide
EVQLVESGGGLVQPGGSLRLSCAASGFTSDFYFIHWVRQAPGKGLEWVATIYPFIGNTYYADSVKGRFTISADTSKNTAYLQMNSLRAEDTAVYYCARAFPGSYHPFDYWGQGTLVTVSSASTKGPSVFPLAPSSKSTSGGTAALGCLVKDYFPEPVTVSWNSGALTSGVHTFPAVLQSSGLYSLSSVVTVPSSSLGTQTYICNVNHKPSNTKVDKKVEPKSCDKTHTCPPCPAPEAAGGPSVFLFPPKPKDTLMISRTPEVTCVVVDVSHEDPEVKFNWYVDGVEVHNAKTKPREEQYNSTYRVVSVLTVLHQDWLNGKEYKCKVSNKALPASIEKTISKAKGQPREPQVCTLPPSREEMTKNQVSLSCAVKGFYPSDIAVEWESNGQPENNYKTTPPVLDSDGSFFLVSKLTVDKSRWQQGNVFSCSVMHEALHNHYTQKSLSLSPGKGGGSGGGSGGGSGGGSGSTGEVQLVESGGGLVQPGGSLRLSCAASGFDFSSSSIHWVRQAPGKGLEWVASISSSYGYTYYADSVKGRFTISADTSKNTAYLQMNSLRAEDTAVYYCARSWAMDYWGQGTLVTVSSGGGGSDIQMTQSPSSLSASVGDRVTITCRASQSVSSAVAWYQQKPGKAPKLLIYSASDLYSGVPSRFSGSRSGTDFTLTISSLQPEDFATYYCQQYAGAGLITFGQGTKVEIK

SEQ ID NO: 961 - protein, 717 aa, Artificial Sequence
  Description of Artificial Sequence: Synthetic polypeptide
MNLLLILTFVAAAVAEVQLVESGGGLVQPGGSLRLSCAASGFTSDFYFIHWVRQAPGKGLEWVATIYPFIGNTYYADSVKGRFTISADTSKNTAYLQMNSLRAEDTAVYYCARAFPGSYHPFDYWGQGTLVTVSSASTKGPSVFPLAPSSKSTSGGTAALGCLVKDYFPEPVTVSWNSGALTSGVHTFPAVLQSSGLYSLSSVVTVPSSSLGTQTYICNVNHKPSNTKVDKKVEPKSCDKTHTCPPCPAPELLGGPSVFLFPPKPKDTLMISRTPEVTCVVVAVSHEDPEVKFNWYVDGVEVHNAKTKPREEQYGSTYRVVSVLTVLHQDWLNGKEYKCKVSNKALPAPIEKTISKAKGQPREPMVFDLPPSREEMTKNQVSLWCMVKGFYPSDIAVEWESNGQPENNYKTTPPVLDSDGSFFLYSKLTVDKSRWQQGNVFSCSVMHEALHNHYTQKSLSLSPGKGGGSGGGSGGGSGGGSGSTGEVQLVESGGGLVQPGGSLRLSCAASGFDFTAYAMHWVRQAPGKGLEWVASIYPSGGYTAYADSVKGRFTISADTSKNTAYLQMNSLRAEDTAVYYCARRSYYFALDYWGQGTLVTVSSGGGGSDIQMTQSPSSLSASVGDRVTITCRASQSVSSAVAWYQQKPGKAPKLLIYSASSLYSGVPSRFSGSRSGTDFTLTISSLQPEDFATYYCQQYWAYYSPITFGQGTKVEIK

SEQ ID NO: 962 - protein, 717 aa, Artificial Sequence
  Description of Artificial Sequence: Synthetic polypeptide
MNLLLILTFVAAAVAEVQLVESGGGLVQPGGSLRLSCAASGFTSDFYFIHWVRQAPGKGLEWVATIYPFIGNTYYADSVKGRFTISADTSKNTAYLQMNSLRAEDTAVYYCARAFPGSYHPFDYWGQGTLVTVSSASTKGPSVFPLAPSSKSTSGGTAALGCLVKDYFPEPVTVSWNSGALTSGVHTFPAVLQSSGLYSLSSVVTVPSSSLGTQTYICNVNHKPSNTKVDKKVEPKSCDKTHTCPPCPAPEAAGGPSVFLFPPKPKDTLMISRTPEVTCVVVDVSHEDPEVKFNWYVDGVEVHNAKTKPREEQYNSTYRVVSVLTVLHQDWLNGKEYKCKVSNKALPASIEKTISKAKGQPREPMVFDLPPSREEMTKNQVSLWCMVKGFYPSDIAVEWESNGQPENNYKTTPPVLDSDGSFFLYSKLTVDKSRWQQGNVFSCSVMHEALHNHYTQKSLSLSPGKGGGSGGGSGGGSGGGSGSTGEVQLVESGGGLVQPGGSLRLSCAASGFDFTAYAMHWVRQAPGKGLEWVASIYPSGGYTAYADSVKGRFTISADTSKNTAYLQMNSLRAEDTAVYYCARRSYYFALDYWGQGTLVTVSSGGGGSDIQMTQSPSSLSASVGDRVTITCRASQSVSSAVAWYQQKPGKAPKLLIYSASSLYSGVPSRFSGSRSGTDFTLTISSLQPEDFATYYCQQYWAYYSPITFGQGTKVEIK

SEQ ID NO: 963 - protein, 717 aa, Artificial Sequence
  Description of Artificial Sequence: Synthetic polypeptide
MNLLLILTFVAAAVAEVQLVESGGGLVQPGGSLRLSCAASGFTSDFYFIHWVRQAPGKGLEWVATIYPFIGNTYYADSVKGRFTISADTSKNTAYLQMNSLRAEDTAVYYCARAFPGSYHPFDYWGQGTLVTVSSASTKGPSVFPLAPSSKSTSGGTAALGCLVKDYFPEPVTVSWNSGALTSGVHTFPAVLQSSGLYSLSSVVTVPSSSLGTQTYICNVNHKPSNTKVDKKVEPKSCDKTHTCPPCPAPEAAGGPSVFLFPPKPKDTLMISRTPEVTCVVVDVSHEDPEVKFNWYVDGVEVHNAKTKPREEQYNSTYRVVSVLTVLHQDWLNGKEYKCKVSNKALPASIEKTISKAKGQPREPQVYTLPPSREEMTKNQVSLWCLVKGFYPSDIAVEWESNGQPENNYKTTPPVLDSDGSFFLYSKLTVDKSRWQQGNVFSCSVMHEALHNHYTQKSLSLSPGKGGGSGGGSGGGSGGGSGSTGEVQLVESGGGLVQPGGSLRLSCAASGFDFTAYAMHWVRQAPGKGLEWVASIYPSGGYTAYADSVKGRFTISADTSKNTAYLQMNSLRAEDTAVYYCARRSYYFALDYWGQGTLVTVSSGGGGSDIQMTQSPSSLSASVGDRVTITCRASQSVSSAVAWYQQKPGKAPKLLIYSASSLYSGVPSRFSGSRSGTDFTLTISSLQPEDFATYYCQQYWAYYSPITFGQGTKVEIK

SEQ ID NO: 964 - protein, 717 aa, Artificial Sequence
  Description of Artificial Sequence: Synthetic polypeptide
MNLLLILTFVAAAVAEVQLVESGGGLVQPGGSLRLSCAASGFTSDFYFIHWVRQAPGKGLEWVATIYPFIGNTYYADSVKGRFTISADTSKNTAYLQMNSLRAEDTAVYYCARAFPGSYHPFDYWGQGTLVTVSSASTKGPSVFPLAPSSKSTSGGTAALGCLVKDYFPEPVTVSWNSGALTSGVHTFPAVLQSSGLYSLSSVVTVPSSSLGTQTYICNVNHKPSNTKVDKKVEPKSCDKTHTCPPCPAPEAAGGPSVFLFPPKPKDTLMISRTPEVTCVVVDVSHEDPEVKFNWYVDGVEVHNAKTKPREEQYNSTYRVVSVLTVLHQDWLNGKEYKCKVSNKALPASIEKTISKAKGQPREPQVYTLPPCREEMTKNQVSLWCLVKGFYPSDIAVEWESNGQPENNYKTTPPVLDSDGSFFLYSKLTVDKSRWQQGNVFSCSVMHEALHNHYTQKSLSLSPGKGGGSGGGSGGGSGGGSGSTGEVQLVESGGGLVQPGGSLRLSCAASGFDFTAYAMHWVRQAPGKGLEWVASIYPSGGYTAYADSVKGRFTISADTSKNTAYLQMNSLRAEDTAVYYCARRSYYFALDYWGQGTLVTVSSGGGGSDIQMTQSPSSLSASVGDRVTITCRASQSVSSAVAWYQQKPGKAPKLLIYSASSLYSGVPSRFSGSRSGTDFTLTISSLQPEDFATYYCQQYWAYYSPITFGQGTKVEIK

SEQ ID NO: 965 - protein, 702 aa, Artificial Sequence
  Description of Artificial Sequence: Synthetic polypeptide
EVQLVESGGGLVQPGGSLRLSCAASGFTSDFYFIHWVRQAPGKGLEWVATIYPFIGNTYYADSVKGRFTISADTSKNTAYLQMNSLRAEDTAVYYCARAFPGSYHPFDYWGQGTLVTVSSASTKGPSVFPLAPSSKSTSGGTAALGCLVKDYFPEPVTVSWNSGALTSGVHTFPAVLQSSGLYSLSSVVTVPSSSLGTQTYICNVNHKPSNTKVDKKVEPKSCDKTHTCPPCPAPELLGGPSVFLFPPKPKDTLMISRTPEVTCVVVAVSHEDPEVKFNWYVDGVEVHNAKTKPREEQYGSTYRVVSVLTVLHQDWLNGKEYKCKVSNKALPAPIEKTISKAKGQPREPMVFDLPPSREEMTKNQVSLWCMVKGFYPSDIAVEWESNGQPENNYKTTPPVLDSDGSFFLYSKLTVDKSRWQQGNVFSCSVMHEALHNHYTQKSLSLSPGKGGGSGGGSGGGSGGGSGSTGEVQLVESGGGLVQPGGSLRLSCAASGFDFTAYAMHWVRQAPGKGLEWVASIYPSGGYTAYADSVKGRFTISADTSKNTAYLQMNSLRAEDTAVYYCARRSYYFALDYWGQGTLVTVSSGGGGSDIQMTQSPSSLSASVGDRVTITCRASQSVSSAVAWYQQKPGKAPKLLIYSASSLYSGVPSRFSGSRSGTDFTLTISSLQPEDFATYYCQQYWAYYSPITFGQGTKVEIK

SEQ ID NO: 966 - protein, 702 aa, Artificial Sequence
  Description of Artificial Sequence: Synthetic polypeptide
EVQLVESGGGLVQPGGSLRLSCAASGFTSDFYFIHWVRQAPGKGLEWVATIYPFIGNTYYADSVKGRFTISADTSKNTAYLQMNSLRAEDTAVYYCARAFPGSYHPFDYWGQGTLVTVSSASTKGPSVFPLAPSSKSTSGGTAALGCLVKDYFPEPVTVSWNSGALTSGVHTFPAVLQSSGLYSLSSVVTVPSSSLGTQTYICNVNHKPSNTKVDKKVEPKSCDKTHTCPPCPAPEAAGGPSVFLFPPKPKDTLMISRTPEVTCVVVDVSHEDPEVKFNWYVDGVEVHNAKTKPREEQYNSTYRVVSVLTVLHQDWLNGKEYKCKVSNKALPASIEKTISKAKGQPREPMVFDLPPSREEMTKNQVSLWCMVKGFYPSDIAVEWESNGQPENNYKTTPPVLDSDGSFFLYSKLTVDKSRWQQGNVFSCSVMHEALHNHYTQKSLSLSPGKGGGSGGGSGGGSGGGSGSTGEVQLVESGGGLVQPGGSLRLSCAASGFDFTAYAMHWVRQAPGKGLEWVASIYPSGGYTAYADSVKGRFTISADTSKNTAYLQMNSLRAEDTAVYYCARRSYYFALDYWGQGTLVTVSSGGGGSDIQMTQSPSSLSASVGDRVTITCRASQSVSSAVAWYQQKPGKAPKLLIYSASSLYSGVPSRFSGSRSGTDFTLTISSLQPEDFATYYCQQYWAYYSPITFGQGTKVEIK

SEQ ID NO: 967 - protein, 702 aa, Artificial Sequence
  Description of Artificial Sequence: Synthetic polypeptide
EVQLVESGGGLVQPGGSLRLSCAASGFTSDFYFIHWVRQAPGKGLEWVATIYPFIGNTYYADSVKGRFTISADTSKNTAYLQMNSLRAEDTAVYYCARAFPGSYHPFDYWGQGTLVTVSSASTKGPSVFPLAPSSKSTSGGTAALGCLVKDYFPEPVTVSWNSGALTSGVHTFPAVLQSSGLYSLSSVVTVPSSSLGTQTYICNVNHKPSNTKVDKKVEPKSCDKTHTCPPCPAPEAAGGPSVFLFPPKPKDTLMISRTPEVTCVVVDVSHEDPEVKFNWYVDGVEVHNAKTKPREEQYNSTYRVVSVLTVLHQDWLNGKEYKCKVSNKALPASIEKTISKAKGQPREPQVYTLPPSREEMTKNQVSLWCLVKGFYPSDIAVEWESNGQPENNYKTTPPVLDSDGSFFLYSKLTVDKSRWQQGNVFSCSVMHEALHNHYTQKSLSLSPGKGGGSGGGSGGGSGGGSGSTGEVQLVESGGGLVQPGGSLRLSCAASGFDFTAYAMHWVRQAPGKGLEWVASIYPSGGYTAYADSVKGRFTISADTSKNTAYLQMNSLRAEDTAVYYCARRSYYFALDYWGQGTLVTVSSGGGGSDIQMTQSPSSLSASVGDRVTITCRASQSVSSAVAWYQQKPGKAPKLLIYSASSLYSGVPSRFSGSRSGTDFTLTISSLQPEDFATYYCQQYWAYYSPITFGQGTKVEIK

SEQ ID NO: 968 - protein, 702 aa, Artificial Sequence
  Description of Artificial Sequence: Synthetic polypeptide
EVQLVESGGGLVQPGGSLRLSCAASGFTSDFYFIHWVRQAPGKGLEWVATIYPFIGNTYYADSVKGRFTISADTSKNTAYLQMNSLRAEDTAVYYCARAFPGSYHPFDYWGQGTLVTVSSASTKGPSVFPLAPSSKSTSGGTAALGCLVKDYFPEPVTVSWNSGALTSGVHTFPAVLQSSGLYSLSSVVTVPSSSLGTQTYICNVNHKPSNTKVDKKVEPKSCDKTHTCPPCPAPEAAGGPSVFLFPPKPKDTLMISRTPEVTCVVVDVSHEDPEVKFNWYVDGVEVHNAKTKPREEQYNSTYRVVSVLTVLHQDWLNGKEYKCKVSNKALPASIEKTISKAKGQPREPQVYTLPPCREEMTKNQVSLWCLVKGFYPSDIAVEWESNGQPENNYKTTPPVLDSDGSFFLYSKLTVDKSRWQQGNVFSCSVMHEALHNHYTQKSLSLSPGKGGGSGGGSGGGSGGGSGSTGEVQLVESGGGLVQPGGSLRLSCAASGFDFTAYAMHWVRQAPGKGLEWVASIYPSGGYTAYADSVKGRFTISADTSKNTAYLQMNSLRAEDTAVYYCARRSYYFALDYWGQGTLVTVSSGGGGSDIQMTQSPSSLSASVGDRVTITCRASQSVSSAVAWYQQKPGKAPKLLIYSASSLYSGVPSRFSGSRSGTDFTLTISSLQPEDFATYYCQQYWAYYSPITFGQGTKVEIK

SEQ ID NO: 969 - protein, 733 aa, Artificial Sequence
  Description of Artificial Sequence: Synthetic polypeptide
MNLLLILTFVAAAVAEVQLVESGGGLVQPGGSLRLSCAASGFDFSSSSIHWVRQAPGKGLEWVASISSSYGYTYYADSVKGRFTISADTSKNTAYLQMNSLRAEDTAVYYCARSWAMDYWGQGTLVTVSSGGGGSDIQMTQSPSSLSASVGDRVTITCRASQSVSSAVAWYQQKPGKAPKLLIYSASDLYSGVPSRFSGSRSGTDFTLTISSLQPEDFATYYCQQYAGAGLITFGQGTKVEIKGGGGSGGGGSEPKSSDKTHTCPPCPAPEAAGGPSVFLFPPKPKDTLMISRTPEVTCVVVDVSHEDPEVKFNWYVDGVEVHNAKTKPREEQYNSTYRVVSVLTVLHQDWLNGKEYKCKVSNKALPASIEKTISKAKGQPREPQVYTLPPIRELMTSNQVSLSCAVKGFYPSDIAVEWESNGQPENNYKTTPPVLDSDGSFFLVSKLTVDKSRWQQGNVFSCSVMHEALHNHYTQKSLSLSPGKGGGSGGGSGGGSGGGSGSTGEVQLVESGGGLVQPGGSLRLSCAASGFTSDFYFIHWVRQAPGKGLEWVATIYPFIGNTYYADSVKGRFTISADTSKNTAYLQMNSLRAEDTAVYYCARAFPGSYHPFDYWGQGTLVTVSSASTKGPSVFPLAPSSKSTSGGTAALGCLVKDYFPEPVTVSWNSGALTSGVHTFPAVLQSSGLYSLSSVVTVPSSSLGTQTYICNVNHKPSNTKVDKKVEPKSCDKTHT

SEQ ID NO: 970 - protein, 733 aa, Artificial Sequence
  Description of Artificial Sequence: Synthetic polypeptide
MNLLLILTFVAAAVAEVQLVESGGGLVQPGGSLRLSCAASGFDFSSSSIHWVRQAPGKGLEWVASISSSYGYTYYADSVKGRFTISADTSKNTAYLQMNSLRAEDTAVYYCARSWAMDYWGQGTLVTVSSGGGGSDIQMTQSPSSLSASVGDRVTITCRASQSVSSAVAWYQQKPGKAPKLLIYSASDLYSGVPSRFSGSRSGTDFTLTISSLQPEDFATYYCQQYAGAGLITFGQGTKVEIKGGGGSGGGGSEPKSSDKTHTCPPCPAPEAAGGPSVFLFPPKPKDTLMISRTPEVTCVVVDVSHEDPEVKFNWYVDGVEVHNAKTKPREEQYNSTYRVVSVLTVLHQDWLNGKEYKCKVSNKALPASIEKTISKAKGQPREPQVYTLPPSREEMTKNQVSLSCAVKGFYPSDIAVEWESNGQPENNYKTTPPVLDSDGSFFLVSKLTVDKSRWQQGNVFSCSVMHEALHNHYTQKSLSLSPGKGGGSGGGSGGGSGGGSGSTGEVQLVESGGGLVQPGGSLRLSCAASGFTSDFYFIHWVRQAPGKGLEWVATIYPFIGNTYYADSVKGRFTISADTSKNTAYLQMNSLRAEDTAVYYCARAFPGSYHPFDYWGQGTLVTVSSASTKGPSVFPLAPSSKSTSGGTAALGCLVKDYFPEPVTVSWNSGALTSGVHTFPAVLQSSGLYSLSSVVTVPSSSLGTQTYICNVNHKPSNTKVDKKVEPKSCDKTHT

SEQ ID NO: 971 - protein, 733 aa, Artificial Sequence
  Description of Artificial Sequence: Synthetic polypeptide
MNLLLILTFVAAAVAEVQLVESGGGLVQPGGSLRLSCAASGFDFSSSSIHWVRQAPGKGLEWVASISSSYGYTYYADSVKGRFTISADTSKNTAYLQMNSLRAEDTAVYYCARSWAMDYWGQGTLVTVSSGGGGSDIQMTQSPSSLSASVGDRVTITCRASQSVSSAVAWYQQKPGKAPKLLIYSASDLYSGVPSRFSGSRSGTDFTLTISSLQPEDFATYYCQQYAGAGLITFGQGTKVEIKGGGGSGGGGSEPKSSDKTHTCPPCPAPEAAGGPSVFLFPPKPKDTLMISRTPEVTCVVVDVSHEDPEVKFNWYVDGVEVHNAKTKPREEQYNSTYRVVSVLTVLHQDWLNGKEYKCKVSNKALPASIEKTISKAKGQPREPQVCTLPPSREEMTKNQVSLSCAVKGFYPSDIAVEWESNGQPENNYKTTPPVLDSDGSFFLVSKLTVDKSRWQQGNVFSCSVMHEALHNHYTQKSLSLSPGKGGGSGGGSGGGSGGGSGSTGEVQLVESGGGLVQPGGSLRLSCAASGFTSDFYFIHWVRQAPGKGLEWVATIYPFIGNTYYADSVKGRFTISADTSKNTAYLQMNSLRAEDTAVYYCARAFPGSYHPFDYWGQGTLVTVSSASTKGPSVFPLAPSSKSTSGGTAALGCLVKDYFPEPVTVSWNSGALTSGVHTFPAVLQSSGLYSLSSVVTVPSSSLGTQTYICNVNHKPSNTKVDKKVEPKSCDKTHT

SEQ ID NO: 972 - protein, 718 aa, Artificial Sequence
  Description of Artificial Sequence: Synthetic polypeptide
EVQLVESGGGLVQPGGSLRLSCAASGFDFSSSSIHWVRQAPGKGLEWVASISSSYGYTYYADSVKGRFTISADTSKNTAYLQMNSLRAEDTAVYYCARSWAMDYWGQGTLVTVSSGGGGSDIQMTQSPSSLSASVGDRVTITCRASQSVSSAVAWYQQKPGKAPKLLIYSASDLYSGVPSRFSGSRSGTDFTLTISSLQPEDFATYYCQQYAGAGLITFGQGTKVEIKGGGGSGGGGSEPKSSDKTHTCPPCPAPELLGGPSVFLFPPKPKDTLMISRTPEVTCVVVAVSHEDPEVKFNWYVDGVEVHNAKTKPREEQYGSTYRVVSVLTVLHQDWLNGKEYKCKVSNKALPAPIEKTISKAKGQPREPQVYTLPPIRELMTSNQVSLSCAVKGFYPSDIAVEWESNGQPENNYKTTPPVLDSDGSFFLVSKLTVDKSRWQQGNVFSCSVMHEALHNHYTQKSLSLSPGKGGGSGGGSGGGSGGGSGSTGEVQLVESGGGLVQPGGSLRLSCAASGFTSDFYFIHWVRQAPGKGLEWVATIYPFIGNTYYADSVKGRFTISADTSKNTAYLQMNSLRAEDTAVYYCARAFPGSYHPFDYWGQGTLVTVSSASTKGPSVFPLAPSSKSTSGGTAALGCLVKDYFPEPVTVSWNSGALTSGVHTFPAVLQSSGLYSLSSVVTVPSSSLGTQTYICNVNHKPSNTKVDKKVEPKSCDKTHT

SEQ ID NO: 973 - protein, 718 aa, Artificial Sequence
  Description of Artificial Sequence: Synthetic polypeptide
EVQLVESGGGLVQPGGSLRLSCAASGFDFSSSSIHWVRQAPGKGLEWVASISSSYGYTYYADSVKGRFTISADTSKNTAYLQMNSLRAEDTAVYYCARSWAMDYWGQGTLVTVSSGGGGSDIQMTQSPSSLSASVGDRVTITCRASQSVSSAVAWYQQKPGKAPKLLIYSASDLYSGVPSRFSGSRSGTDFTLTISSLQPEDFATYYCQQYAGAGLITFGQGTKVEIKGGGGSGGGGSEPKSSDKTHTCPPCPAPEAAGGPSVFLFPPKPKDTLMISRTPEVTCVVVDVSHEDPEVKFNWYVDGVEVHNAKTKPREEQYNSTYRVVSVLTVLHQDWLNGKEYKCKVSNKALPASIEKTISKAKGQPREPQVYTLPPIRELMTSNQVSLSCAVKGFYPSDIAVEWESNGQPENNYKTTPPVLDSDGSFFLVSKLTVDKSRWQQGNVFSCSVMHEALHNHYTQKSLSLSPGKGGGSGGGSGGGSGGGSGSTGEVQLVESGGGLVQPGGSLRLSCAASGFTSDFYFIHWVRQAPGKGLEWVATIYPFIGNTYYADSVKGRFTISADTSKNTAYLQMNSLRAEDTAVYYCARAFPGSYHPFDYWGQGTLVTVSSASTKGPSVFPLAPSSKSTSGGTAALGCLVKDYFPEPVTVSWNSGALTSGVHTFPAVLQSSGLYSLSSVVTVPSSSLGTQTYICNVNHKPSNTKVDKKVEPKSCDKTHT

SEQ ID NO: 974 - protein, 718 aa, Artificial Sequence
  Description of Artificial Sequence: Synthetic polypeptide
EVQLVESGGGLVQPGGSLRLSCAASGFDFSSSSIHWVRQAPGKGLEWVASISSSYGYTYYADSVKGRFTISADTSKNTAYLQMNSLRAEDTAVYYCARSWAMDYWGQGTLVTVSSGGGGSDIQMTQSPSSLSASVGDRVTITCRASQSVSSAVAWYQQKPGKAPKLLIYSASDLYSGVPSRFSGSRSGTDFTLTISSLQPEDFATYYCQQYAGAGLITFGQGTKVEIKGGGGSGGGGSEPKSSDKTHTCPPCPAPEAAGGPSVFLFPPKPKDTLMISRTPEVTCVVVDVSHEDPEVKFNWYVDGVEVHNAKTKPREEQYNSTYRVVSVLTVLHQDWLNGKEYKCKVSNKALPASIEKTISKAKGQPREPQVYTLPPSREEMTKNQVSLSCAVKGFYPSDIAVEWESNGQPENNYKTTPPVLDSDGSFFLVSKLTVDKSRWQQGNVFSCSVMHEALHNHYTQKSLSLSPGKGGGSGGGSGGGSGGGSGSTGEVQLVESGGGLVQPGGSLRLSCAASGFTSDFYFIHWVRQAPGKGLEWVATIYPFIGNTYYADSVKGRFTISADTSKNTAYLQMNSLRAEDTAVYYCARAFPGSYHPFDYWGQGTLVTVSSASTKGPSVFPLAPSSKSTSGGTAALGCLVKDYFPEPVTVSWNSGALTSGVHTFPAVLQSSGLYSLSSVVTVPSSSLGTQTYICNVNHKPSNTKVDKKVEPKSCDKTHT

SEQ ID NO: 975 - protein, 718 aa, Artificial Sequence
  Description of Artificial Sequence: Synthetic polypeptide
EVQLVESGGGLVQPGGSLRLSCAASGFDFSSSSIHWVRQAPGKGLEWVASISSSYGYTYYADSVKGRFTISADTSKNTAYLQMNSLRAEDTAVYYCARSWAMDYWGQGTLVTVSSGGGGSDIQMTQSPSSLSASVGDRVTITCRASQSVSSAVAWYQQKPGKAPKLLIYSASDLYSGVPSRFSGSRSGTDFTLTISSLQPEDFATYYCQQYAGAGLITFGQGTKVEIKGGGGSGGGGSEPKSSDKTHTCPPCPAPEAAGGPSVFLFPPKPKDTLMISRTPEVTCVVVDVSHEDPEVKFNWYVDGVEVHNAKTKPREEQYNSTYRVVSVLTVLHQDWLNGKEYKCKVSNKALPASIEKTISKAKGQPREPQVCTLPPSREEMTKNQVSLSCAVKGFYPSDIAVEWESNGQPENNYKTTPPVLDSDGSFFLVSKLTVDKSRWQQGNVFSCSVMHEALHNHYTQKSLSLSPGKGGGSGGGSGGGSGGGSGSTGEVQLVESGGGLVQPGGSLRLSCAASGFTSDFYFIHWVRQAPGKGLEWVATIYPFIGNTYYADSVKGRFTISADTSKNTAYLQMNSLRAEDTAVYYCARAFPGSYHPFDYWGQGTLVTVSSASTKGPSVFPLAPSSKSTSGGTAALGCLVKDYFPEPVTVSWNSGALTSGVHTFPAVLQSSGLYSLSSVVTVPSSSLGTQTYICNVNHKPSNTKVDKKVEPKSCDKTHT

SEQ ID NO: 976 - protein, 737 aa, Artificial Sequence
  Description of Artificial Sequence: Synthetic polypeptide
MNLLLILTFVAAAVAEVQLVESGGGLVQPGGSLRLSCAASGFDFTAYAMHWVRQAPGKGLEWVASIYPSGGYTAYADSVKGRFTISADTSKNTAYLQMNSLRAEDTAVYYCARRSYYFALDYWGQGTLVTVSSGGGGSDIQMTQSPSSLSASVGDRVTITCRASQSVSSAVAWYQQKPGKAPKLLIYSASSLYSGVPSRFSGSRSGTDFTLTISSLQPEDFATYYCQQYWAYYSPITFGQGTKVEIKGGGGSGGGGSEPKSSDKTHTCPPCPAPELLGGPSVFLFPPKPKDTLMISRTPEVTCVVVAVSHEDPEVKFNWYVDGVEVHNAKTKPREEQYGSTYRVVSVLTVLHQDWLNGKEYKCKVSNKALPAPIEKTISKAKGQPREPMVFDLPPSREEMTKNQVSLWCMVKGFYPSDIAVEWESNGQPENNYKTTPPVLDSDGSFFLYSKLTVDKSRWQQGNVFSCSVMHEALHNHYTQKSLSLSPGKGGGSGGGSGGGSGGGSGSTGEVQLVESGGGLVQPGGSLRLSCAASGFTSDFYFIHWVRQAPGKGLEWVATIYPFIGNTYYADSVKGRFTISADTSKNTAYLQMNSLRAEDTAVYYCARAFPGSYHPFDYWGQGTLVTVSSASTKGPSVFPLAPSSKSTSGGTAALGCLVKDYFPEPVTVSWNSGALTSGVHTFPAVLQSSGLYSLSSVVTVPSSSLGTQTYICNVNHKPSNTKVDKKVEPKSCDKTHT

SEQ ID NO: 977 - protein, 737 aa, Artificial Sequence
  Description of Artificial Sequence: Synthetic polypeptide
MNLLLILTFVAAAVAEVQLVESGGGLVQPGGSLRLSCAASGFDFTAYAMHWVRQAPGKGLEWVASIYPSGGYTAYADSVKGRFTISADTSKNTAYLQMNSLRAEDTAVYYCARRSYYFALDYWGQGTLVTVSSGGGGSDIQMTQSPSSLSASVGDRVTITCRASQSVSSAVAWYQQKPGKAPKLLIYSASSLYSGVPSRFSGSRSGTDFTLTISSLQPEDFATYYCQQYWAYYSPITFGQGTKVEIKGGGGSGGGGSEPKSSDKTHTCPPCPAPEAAGGPSVFLFPPKPKDTLMISRTPEVTCVVVDVSHEDPEVKFNWYVDGVEVHNAKTKPREEQYNSTYRVVSVLTVLHQDWLNGKEYKCKVSNKALPASIEKTISKAKGQPREPMVFDLPPSREEMTKNQVSLWCMVKGFYPSDIAVEWESNGQPENNYKTTPPVLDSDGSFFLYSKLTVDKSRWQQGNVFSCSVMHEALHNHYTQKSLSLSPGKGGGSGGGSGGGSGGGSGSTGEVQLVESGGGLVQPGGSLRLSCAASGFTSDFYFIHWVRQAPGKGLEWVATIYPFIGNTYYADSVKGRFTISADTSKNTAYLQMNSLRAEDTAVYYCARAFPGSYHPFDYWGQGTLVTVSSASTKGPSVFPLAPSSKSTSGGTAALGCLVKDYFPEPVTVSWNSGALTSGVHTFPAVLQSSGLYSLSSVVTVPSSSLGTQTYICNVNHKPSNTKVDKKVEPKSCDKTHT

SEQ ID NO: 978 - protein, 737 aa, Artificial Sequence
  Description of Artificial Sequence: Synthetic polypeptide
MNLLLILTFVAAAVAEVQLVESGGGLVQPGGSLRLSCAASGFDFTAYAMHWVRQAPGKGLEWVASIYPSGGYTAYADSVKGRFTISADTSKNTAYLQMNSLRAEDTAVYYCARRSYYFALDYWGQGTLVTVSSGGGGSDIQMTQSPSSLSASVGDRVTITCRASQSVSSAVAWYQQKPGKAPKLLIYSASSLYSGVPSRFSGSRSGTDFTLTISSLQPEDFATYYCQQYWAYYSPITFGQGTKVEIKGGGGSGGGGSEPKSSDKTHTCPPCPAPEAAGGPSVFLFPPKPKDTLMISRTPEVTCVVVDVSHEDPEVKFNWYVDGVEVHNAKTKPREEQYNSTYRVVSVLTVLHQDWLNGKEYKCKVSNKALPASIEKTISKAKGQPREPQVYTLPPSREEMTKNQVSLWCLVKGFYPSDIAVEWESNGQPENNYKTTPPVLDSDGSFFLYSKLTVDKSRWQQGNVFSCSVMHEALHNHYTQKSLSLSPGKGGGSGGGSGGGSGGGSGSTGEVQLVESGGGLVQPGGSLRLSCAASGFTSDFYFIHWVRQAPGKGLEWVATIYPFIGNTYYADSVKGRFTISADTSKNTAYLQMNSLRAEDTAVYYCARAFPGSYHPFDYWGQGTLVTVSSASTKGPSVFPLAPSSKSTSGGTAALGCLVKDYFPEPVTVSWNSGALTSGVHTFPAVLQSSGLYSLSSVVTVPSSSLGTQTYICNVNHKPSNTKVDKKVEPKSCDKTHT

SEQ ID NO: 979 - protein, 737 aa, Artificial Sequence
  Description of Artificial Sequence: Synthetic polypeptide
MNLLLILTFVAAAVAEVQLVESGGGLVQPGGSLRLSCAASGFDFTAYAMHWVRQAPGKGLEWVASIYPSGGYTAYADSVKGRFTISADTSKNTAYLQMNSLRAEDTAVYYCARRSYYFALDYWGQGTLVTVSSGGGGSDIQMTQSPSSLSASVGDRVTITCRASQSVSSAVAWYQQKPGKAPKLLIYSASSLYSGVPSRFSGSRSGTDFTLTISSLQPEDFATYYCQQYWAYYSPITFGQGTKVEIKGGGGSGGGGSEPKSSDKTHTCPPCPAPEAAGGPSVFLFPPKPKDTLMISRTPEVTCVVVDVSHEDPEVKFNWYVDGVEVHNAKTKPREEQYNSTYRVVSVLTVLHQDWLNGKEYKCKVSNKALPASIEKTISKAKGQPREPQVYTLPPCREEMTKNQVSLWCLVKGFYPSDIAVEWESNGQPENNYKTTPPVLDSDGSFFLYSKLTVDKSRWQQGNVFSCSVMHEALHNHYTQKSLSLSPGKGGGSGGGSGGGSGGGSGSTGEVQLVESGGGLVQPGGSLRLSCAASGFTSDFYFIHWVRQAPGKGLEWVATIYPFIGNTYYADSVKGRFTISADTSKNTAYLQMNSLRAEDTAVYYCARAFPGSYHPFDYWGQGTLVTVSSASTKGPSVFPLAPSSKSTSGGTAALGCLVKDYFPEPVTVSWNSGALTSGVHTFPAVLQSSGLYSLSSVVTVPSSSLGTQTYICNVNHKPSNTKVDKKVEPKSCDKTHT

SEQ ID NO: 980 - protein, 722 aa, Artificial Sequence
  Description of Artificial Sequence: Synthetic polypeptide
EVQLVESGGGLVQPGGSLRLSCAASGFDFTAYAMHWVRQAPGKGLEWVASIYPSGGYTAYADSVKGRFTISADTSKNTAYLQMNSLRAEDTAVYYCARRSYYFALDYWGQGTLVTVSSGGGGSDIQMTQSPSSLSASVGDRVTITCRASQSVSSAVAWYQQKPGKAPKLLIYSASSLYSGVPSRFSGSRSGTDFTLTISSLQPEDFATYYCQQYWAYYSPITFGQGTKVEIKGGGGSGGGGSEPKSSDKTHTCPPCPAPELLGGPSVFLFPPKPKDTLMISRTPEVTCVVVAVSHEDPEVKFNWYVDGVEVHNAKTKPREEQYGSTYRVVSVLTVLHQDWLNGKEYKCKVSNKALPAPIEKTISKAKGQPREPMVFDLPPSREEMTKNQVSLWCMVKGFYPSDIAVEWESNGQPENNYKTTPPVLDSDGSFFLYSKLTVDKSRWQQGNVFSCSVMHEALHNHYTQKSLSLSPGKGGGSGGGSGGGSGGGSGSTGEVQLVESGGGLVQPGGSLRLSCAASGFTSDFYFIHWVRQAPGKGLEWVATIYPFIGNTYYADSVKGRFTISADTSKNTAYLQMNSLRAEDTAVYYCARAFPGSYHPFDYWGQGTLVTVSSASTKGPSVFPLAPSSKSTSGGTAALGCLVKDYFPEPVTVSWNSGALTSGVHTFPAVLQSSGLYSLSSVVTVPSSSLGTQTYICNVNHKPSNTKVDKKVEPKSCDKTHT

SEQ ID NO: 981 - protein, 722 aa, Artificial Sequence
  Description of Artificial Sequence: Synthetic polypeptide
EVQLVESGGGLVQPGGSLRLSCAASGFDFTAYAMHWVRQAPGKGLEWVASIYPSGGYTAYADSVKGRFTISADTSKNTAYLQMNSLRAEDTAVYYCARRSYYFALDYWGQGTLVTVSSGGGGSDIQMTQSPSSLSASVGDRVTITCRASQSVSSAVAWYQQKPGKAPKLLIYSASSLYSGVPSRFSGSRSGTDFTLTISSLQPEDFATYYCQQYWAYYSPITFGQGTKVEIKGGGGSGGGGSEPKSSDKTHTCPPCPAPEAAGGPSVFLFPPKPKDTLMISRTPEVTCVVVDVSHEDPEVKFNWYVDGVEVHNAKTKPREEQYNSTYRVVSVLTVLHQDWLNGKEYKCKVSNKALPASIEKTISKAKGQPREPMVFDLPPSREEMTKNQVSLWCMVKGFYPSDIAVEWESNGQPENNYKTTPPVLDSDGSFFLYSKLTVDKSRWQQGNVFSCSVMHEALHNHYTQKSLSLSPGKGGGSGGGSGGGSGGGSGSTGEVQLVESGGGLVQPGGSLRLSCAASGFTSDFYFIHWVRQAPGKGLEWVATIYPFIGNTYYADSVKGRFTISADTSKNTAYLQMNSLRAEDTAVYYCARAFPGSYHPFDYWGQGTLVTVSSASTKGPSVFPLAPSSKSTSGGTAALGCLVKDYFPEPVTVSWNSGALTSGVHTFPAVLQSSGLYSLSSVVTVPSSSLGTQTYICNVNHKPSNTKVDKKVEPKSCDKTHT

SEQ ID NO: 982 - protein, 722 aa, Artificial Sequence
  Description of Artificial Sequence: Synthetic polypeptide
EVQLVESGGGLVQPGGSLRLSCAASGFDFTAYAMHWVRQAPGKGLEWVASIYPSGGYTAYADSVKGRFTISADTSKNTAYLQMNSLRAEDTAVYYCARRSYYFALDYWGQGTLVTVSSGGGGSDIQMTQSPSSLSASVGDRVTITCRASQSVSSAVAWYQQKPGKAPKLLIYSASSLYSGVPSRFSGSRSGTDFTLTISSLQPEDFATYYCQQYWAYYSPITFGQGTKVEIKGGGGSGGGGSEPKSSDKTHTCPPCPAPEAAGGPSVFLFPPKPKDTLMISRTPEVTCVVVDVSHEDPEVKFNWYVDGVEVHNAKTKPREEQYNSTYRVVSVLTVLHQDWLNGKEYKCKVSNKALPASIEKTISKAKGQPREPQVYTLPPSREEMTKNQVSLWCLVKGFYPSDIAVEWESNGQPENNYKTTPPVLDSDGSFFLYSKLTVDKSRWQQGNVFSCSVMHEALHNHYTQKSLSLSPGKGGGSGGGSGGGSGGGSGSTGEVQLVESGGGLVQPGGSLRLSCAASGFTSDFYFIHWVRQAPGKGLEWVATIYPFIGNTYYADSVKGRFTISADTSKNTAYLQMNSLRAEDTAVYYCARAFPGSYHPFDYWGQGTLVTVSSASTKGPSVFPLAPSSKSTSGGTAALGCLVKDYFPEPVTVSWNSGALTSGVHTFPAVLQSSGLYSLSSVVTVPSSSLGTQTYICNVNHKPSNTKVDKKVEPKSCDKTHT

SEQ ID NO: 983 - protein, 722 aa, Artificial Sequence
  Description of Artificial Sequence: Synthetic polypeptide
EVQLVESGGGLVQPGGSLRLSCAASGFDFTAYAMHWVRQAPGKGLEWVASIYPSGGYTAYADSVKGRFTISADTSKNTAYLQMNSLRAEDTAVYYCARRSYYFALDYWGQGTLVTVSSGGGGSDIQMTQSPSSLSASVGDRVTITCRASQSVSSAVAWYQQKPGKAPKLLIYSASSLYSGVPSRFSGSRSGTDFTLTISSLQPEDFATYYCQQYWAYYSPITFGQGTKVEIKGGGGSGGGGSEPKSSDKTHTCPPCPAPEAAGGPSVFLFPPKPKDTLMISRTPEVTCVVVDVSHEDPEVKFNWYVDGVEVHNAKTKPREEQYNSTYRVVSVLTVLHQDWLNGKEYKCKVSNKALPASIEKTISKAKGQPREPQVYTLPPCREEMTKNQVSLWCLVKGFYPSDIAVEWESNGQPENNYKTTPPVLDSDGSFFLYSKLTVDKSRWQQGNVFSCSVMHEALHNHYTQKSLSLSPGKGGGSGGGSGGGSGGGSGSTGEVQLVESGGGLVQPGGSLRLSCAASGFTSDFYFIHWVRQAPGKGLEWVATIYPFIGNTYYADSVKGRFTISADTSKNTAYLQMNSLRAEDTAVYYCARAFPGSYHPFDYWGQGTLVTVSSASTKGPSVFPLAPSSKSTSGGTAALGCLVKDYFPEPVTVSWNSGALTSGVHTFPAVLQSSGLYSLSSVVTVPSSSLGTQTYICNVNHKPSNTKVDKKVEPKSCDKTHT

SEQ ID NO: 984 - protein, 214 aa, Artificial Sequence
  Description of Artificial Sequence: Synthetic polypeptide
DIQMTQSPSSLSASVGDRVTITCRASQSVSSAVAWYQQKPGKAPKLLIYSASSLYSGVPSRFSGSRSGTDFTLTISSLQPEDFATYYCQQSTGSLITFGQGTKVEIKRTVAAPSVFIFPPSDEQLKSGTASVVCLLNNFYPREAKVQWKVDNALQSGNSQESVTEQDSKDSTYSLSSTLTLSKADYEKHKVYACEVTHQGLSSPVTKSFNRGEC

SEQ ID NO: 985 - protein, 10 aa, Artificial Sequence
  Description of Artificial Sequence: Synthetic peptide
TVYPYLDYTY

SEQ ID NO: 986 - protein, 735 aa, Artificial Sequence
  Description of Artificial Sequence: Synthetic polypeptide
MNLLLILTFVAAAVAEVQLVESGGGLVQPGGSLRLSCAASGFTLSYSYIHWVRQAPGKGLEWVASIYSYTGATDYADSVKGRFTISADTSKNTAYLQMNSLRAEDTAVYYCARYWSTNRILSYGGMDYWGQGTLVTVSSGGGGSDIQMTQSPSSLSASVGDRVTITCRASQSVSSAVAWYQQKPGKAPKLLIYSASSLYSGVPSRFSGSRSGTDFTLTISSLQPEDFATYYCQQYFDPITFGQGTKVEIKGGGGSGGGGSEPKSSDKTHTCPPCPAPELLGGPSVFLFPPKPKDTLMISRTPEVTCVVVAVSHEDPEVKFNWYVDGVEVHNAKTKPREEQYGSTYRVVSVLTVLHQDWLNGKEYKCKVSNKALPAPIEKTISKAKGQPREPQVYTLPPIRELMTSNQVSLSCAVKGFYPSDIAVEWESNGQPENNYKTTPPVLDSDGSFFLVSKLTVDKSRWQQGNVFSCSVMHEALHNHYTQKSLSLSPGKGGGSGGGSGGGSGGGSGSTGEVQLVESGGGLVQPGGSLRLSCAASGFNIAYSSMHWVRQAPGKGLEWVATIYPSYSSTYYADSVKGRFTISADTSKNTAYLQMNSLRAEDTAVYYCARYYAMDYWGQGTLVTVSSASTKGPSVFPLAPSSKSTSGGTAALGCLVKDYFPEPVTVSWNSGALTSGVHTFPAVLQSSGLYSLSSVVTVPSSSLGTQTYICNVNHKPSNTKVDKKVEPKSCDKTHT

SEQ ID NO: 987 - protein, 733 aa, Artificial Sequence
  Description of Artificial Sequence: Synthetic polypeptide
MNLLLILTFVAAAVAEVQLVESGGGLVQPGGSLRLSCAASGFDLSHSSIHWVRQAPGKGLEWVASISSHYGYTHYADSVKGRFTISADTSKNTAYLQMNSLRAEDTAVYYCARSSYFPWFFALDYWGQGTLVTVSSGGGGSDIQMTQSPSSLSASVGDRVTITCRASQDVSTAVAWYQQKPGKAPKLLIYSASFLYSGVPSRFSGSRSGTDFTLTISSLQPEDFATYYCQQHYTTPPTFGQGTKVEIKGGGGSGGGGSEPKTSDKTHTCPPCPAPELLGGPSVFLFPPKPKDTLMISRTPEVTCVVVAVSHEDPEVKFNWYVDGVEVHNAKTKPREEQYGSTYRVVSVLTVLHQDWLNGKEYKCKVSNKALPAPIEKTISKAKGQPREPMVFDLPPSREEMTKNQVSLWCMVKGFYPSDIAVEWESNGQPENNYKTTPPVLDSDGSFFLYSKLTVDKSRWQQGNVFSCSVMHEALHNHYTQKSLSLSPGKGGGSGGGSGGGSGGGSGSTGEVQLVESGGGLVQPGGSLRLSCAASGFNIAYSSMHWVRQAPGKGLEWVATIYPSYSSTYYADSVKGRFTISADTSKNTAYLQMNSLRAEDTAVYYCARYYAMDYWGQGTLVTVSSASTKGPSVFPLAPSSKSTSGGTAALGCLVKDYFPEPVTVSWNSGALTSGVHTFPAVLQSSGLYSLSSVVTVPSSSLGTQTYICNVNHKPSNTKVDKKVEPKSCDKTHT

SEQ ID NO: 988 - protein, 735 aa, Artificial Sequence
  Description of Artificial Sequence: Synthetic polypeptide
MNLLLILTFVAAAVAEVQLVESGGGLVQPGGSLRLSCAASGFTLSYSYIHWVRQAPGKGLEWVASIYSYTGATDYADSVKGRFTISADTSKNTAYLQMNSLRAEDTAVYYCARYWSTNRILSYGGMDYWGQGTLVTVSSGGGGSDIQMTQSPSSLSASVGDRVTITCRASQSVSSAVAWYQQKPGKAPKLLIYSASSLYSGVPSRFSGSRSGTDFTLTISSLQPEDFATYYCQQYFDPITFGQGTKVEIKGGGGSGGGGSEPKSSDKTHTCPPCPAPELLGGPSVFLFPPKPKDTLMISRTPEVTCVVVAVSHEDPEVKFNWYVDGVEVHNAKTKPREEQYGSTYRVVSVLTVLHQDWLNGKEYKCKVSNKALPAPIEKTISKAKGQPREPQVYTLPPIRELMTSNQVSLSCAVKGFYPSDIAVEWESNGQPENNYKTTPPVLDSDGSFFLVSKLTVDKSRWQQGNVFSCSVMHEALHNHYTQKSLSLSPGKGGGSGGGSGGGSGGGSGSTGEVQLVESGGGLVQPGGSLRLSCAASGFNIAYSSMHWVRQAPGKGLEWVATIYPSYSSTYYADSVKGRFTISADTSKNTAYLQMNSLRAEDTAVYYCARDYAMDYWGQGTLVTVSSASTKGPSVFPLAPSSKSTSGGTAALGCLVKDYFPEPVTVSWNSGALTSGVHTFPAVLQSSGLYSLSSVVTVPSSSLGTQTYICNVNHKPSNTKVDKKVEPKSCDKTHT

SEQ ID NO: 989 - protein, 733 aa, Artificial Sequence
  Description of Artificial Sequence: Synthetic polypeptide
MNLLLILTFVAAAVAEVQLVESGGGLVQPGGSLRLSCAASGFDLSHSSIHWVRQAPGKGLEWVASISSHYGYTHYADSVKGRFTISADTSKNTAYLQMNSLRAEDTAVYYCARSSYFPWFFALDYWGQGTLVTVSSGGGGSDIQMTQSPSSLSASVGDRVTITCRASQDVSTAVAWYQQKPGKAPKLLIYSASFLYSGVPSRFSGSRSGTDFTLTISSLQPEDFATYYCQQHYTTPPTFGQGTKVEIKGGGGSGGGGSEPKTSDKTHTCPPCPAPELLGGPSVFLFPPKPKDTLMISRTPEVTCVVVAVSHEDPEVKFNWYVDGVEVHNAKTKPREEQYGSTYRVVSVLTVLHQDWLNGKEYKCKVSNKALPAPIEKTISKAKGQPREPMVFDLPPSREEMTKNQVSLWCMVKGFYPSDIAVEWESNGQPENNYKTTPPVLDSDGSFFLYSKLTVDKSRWQQGNVFSCSVMHEALHNHYTQKSLSLSPGKGGGSGGGSGGGSGGGSGSTGEVQLVESGGGLVQPGGSLRLSCAASGFNIAYSSMHWVRQAPGKGLEWVATIYPSYSSTYYADSVKGRFTISADTSKNTAYLQMNSLRAEDTAVYYCARDYAMDYWGQGTLVTVSSASTKGPSVFPLAPSSKSTSGGTAALGCLVKDYFPEPVTVSWNSGALTSGVHTFPAVLQSSGLYSLSSVVTVPSSSLGTQTYICNVNHKPSNTKVDKKVEPKSCDKTHT

SEQ ID NO: 990 - protein, 735 aa, Artificial Sequence
  Description of Artificial Sequence: Synthetic polypeptide
MNLLLILTFVAAAVAEVQLVESGGGLVQPGGSLRLSCAASGFTLSYSYIHWVRQAPGKGLEWVASIYSYTGATDYADSVKGRFTISADTSKNTAYLQMNSLRAEDTAVYYCARYWSTNRILSYGGMDYWGQGTLVTVSSGGGGSDIQMTQSPSSLSASVGDRVTITCRASQSVSSAVAWYQQKPGKAPKLLIYSASSLYSGVPSRFSGSRSGTDFTLTISSLQPEDFATYYCQQYFDPITFGQGTKVEIKGGGGSGGGGSEPKSSDKTHTCPPCPAPELLGGPSVFLFPPKPKDTLMISRTPEVTCVVVAVSHEDPEVKFNWYVDGVEVHNAKTKPREEQYGSTYRVVSVLTVLHQDWLNGKEYKCKVSNKALPAPIEKTISKAKGQPREPQVYTLPPIRELMTSNQVSLSCAVKGFYPSDIAVEWESNGQPENNYKTTPPVLDSDGSFFLVSKLTVDKSRWQQGNVFSCSVMHEALHNHYTQKSLSLSPGKGGGSGGGSGGGSGGGSGSTGEVQLVESGGGLVQPGGSLRLSCAASGFNIAYSSMHWVRQAPGKGLEWVATIYPSYSSTYYADSVKGRFTISADTSKNTAYLQMNSLRAEDTAVYYCARYYDMDYWGQGTLVTVSSASTKGPSVFPLAPSSKSTSGGTAALGCLVKDYFPEPVTVSWNSGALTSGVHTFPAVLQSSGLYSLSSVVTVPSSSLGTQTYICNVNHKPSNTKVDKKVEPKSCDKTHT

SEQ ID NO: 991 - protein, 733 aa, Artificial Sequence
  Description of Artificial Sequence: Synthetic polypeptide
MNLLLILTFVAAAVAEVQLVESGGGLVQPGGSLRLSCAASGFDLSHSSIHWVRQAPGKGLEWVASISSHYGYTHYADSVKGRFTISADTSKNTAYLQMNSLRAEDTAVYYCARSSYFPWFFALDYWGQGTLVTVSSGGGGSDIQMTQSPSSLSASVGDRVTITCRASQDVSTAVAWYQQKPGKAPKLLIYSASFLYSGVPSRFSGSRSGTDFTLTISSLQPEDFATYYCQQHYTTPPTFGQGTKVEIKGGGGSGGGGSEPKTSDKTHTCPPCPAPELLGGPSVFLFPPKPKDTLMISRTPEVTCVVVAVSHEDPEVKFNWYVDGVEVHNAKTKPREEQYGSTYRVVSVLTVLHQDWLNGKEYKCKVSNKALPAPIEKTISKAKGQPREPMVFDLPPSREEMTKNQVSLWCMVKGFYPSDIAVEWESNGQPENNYKTTPPVLDSDGSFFLYSKLTVDKSRWQQGNVFSCSVMHEALHNHYTQKSLSLSPGKGGGSGGGSGGGSGGGSGSTGEVQLVESGGGLVQPGGSLRLSCAASGFNIAYSSMHWVRQAPGKGLEWVATIYPSYSSTYYADSVKGRFTISADTSKNTAYLQMNSLRAEDTAVYYCARYYDMDYWGQGTLVTVSSASTKGPSVFPLAPSSKSTSGGTAALGCLVKDYFPEPVTVSWNSGALTSGVHTFPAVLQSSGLYSLSSVVTVPSSSLGTQTYICNVNHKPSNTKVDKKVEPKSCDKTHT

SEQ ID NO: 992 - protein, 229 aa, Artificial Sequence
  Description of Artificial Sequence: Synthetic polypeptide
MNLLLILTFVAAAVADIQMTQSPSSLSASVGDRVTITCRASQSVSSAVAWYQQKPGKAPKLLIYSASSLYSGVPSRFSGSRSGTDFTLTISSLQPEDFATYYCQQAHYFPITFGQGTKVEIKRTVAAPSVFIFPPSDEQLKSGTASVVCLLNNFYPREAKVQWKVDNALQSGNSQESVTEQDSKDSTYSLSSTLTLSKADYEKHKVYACEVTHQGLSSPVTKSFNRGEC

SEQ ID NO: 993 - protein, 741 aa, Artificial Sequence
  Description of Artificial Sequence: Synthetic polypeptide
MNLLLILTFVAAAVAEFEVQLVESGGGLVQPGGSLRLSCAASGFNIGSSSIHWVRQAPGKGLEWVASIYSAFASTSYADSVKGRFTISADTSKNTAYLQMNSLRAEDTAVYYCARYHFPFGFALDYWGQGTLVTVSSGGGGSDIQMTQSPSSLSASVGDRVTITCRASQSVSSAVAWYQQKPGKAPKLLIYSASSLYSGVPSRFSGSRSGTDFTLTISSLQPEDFATYYCQQGVYLFTFGQGTKVEIKLEDKTHTKVEPKSSDKTHTCPPCPAPELLGGPSVFLFPPKPKDTLMISRTPEVTCVVVDVSHEDPEVKFNWYVDGVEVHNAKTKPREEQYNSTYRVVSVLTVLHQDWLNGKEYKCKVSNKALPAPIEKTISKAKGQPREPQVYTLPPSREEMTKNQVSLTCLVKGFYPSDIAVEWESNGQPENNYKTTPPVLDSDGSFFLYSKLTVDKSRWQQGNVFSCSVMHEALHNHYTQKSLSLSPGKSGSETPGTSESATPESGGGEVQLVESGGGLVQPGGSLRLSCAASGFNISYSSIHWVRQAPGKGLEWVAYISSYYGYTYYADSVKGRFTISADTSKNTAYLQMNSLRAEDTAVYYCARAHYFPWAGAMDYWGQGTLVTVSSGGGGSDIQMTQSPSSLSASVGDRVTITCRASQSVSSAVAWYQQKPGKAPKLLIYSASSLYSGVPSRFSGSRSGTDFTLTISSLQPEDFATYYCQQYSWGPFTFGQGTKVEIK

SEQ ID NO: 994 - protein, 746 aa, Artificial Sequence
  Description of Artificial Sequence: Synthetic polypeptide
MNLLLILTFVAAAVAEFEVQLVESGGGLVQPGGSLRLSCAASGFNIGSSSIHWVRQAPGKGLEWVASIYSAFASTSYADSVKGRFTISADTSKNTAYLQMNSLRAEDTAVYYCARYHFPFGFALDYWGQGTLVTVSSGGGGSDIQMTQSPSSLSASVGDRVTITCRASQSVSSAVAWYQQKPGKAPKLLIYSASSLYSGVPSRFSGSRSGTDFTLTISSLQPEDFATYYCQQGVYLFTFGQGTKVEIKLEDKTHTKVEPKSSDKTHNCPPCPAPELLGGPSVFLFPPKPKDTLMISRTPEVTCVVVDVSHEDPEVKFNWYVDGVEVHNAKTKPREEQYNSTYRVVSVLTVLHQDWLNGKEYKCKVSNKALPAPIEKTISKAKGQPREPQVYTLPPIRELMTSNQVSLSCAVKGFYPSDIAVEWESNGQPENNYKTTPPVLDSDGSFFLVSKLTVDKSRWQQGNVFSCSVMHEALHNHYTQKSLSLSPGKSGSETPGTSESATPESGGGEVQLVESGGGLVQPGGSLRLSCAASGFNISSYYIHWVRQAPGKGLEWVASIYSSYGYTSYADSVKGRFTISADTSKNTAYLQMNSLRAEDTAVYYCARTVRGSKKPYFSGWAMDYWGQGTLVTVSSGGGGSDIQMTQSPSSLSASVGDRVTITCRASQSVSSAVAWYQQKPGKAPKLLIYSASSLYSGVPSRFSGSRSGTDFTLTISSLQPEDFATYYCQQYSWGPFTFGQGTKVEIK

SEQ ID NO: 995 - protein, 740 aa, Artificial Sequence
  Description of Artificial Sequence: Synthetic polypeptide
MNLLLILTFVAAAVAEFEVQLVESGGGLVQPGGSLRLSCAASGFNIGSSSIHWVRQAPGKGLEWVASIYSAFASTSYADSVKGRFTISADTSKNTAYLQMNSLRAEDTAVYYCARYHFPFGFALDYWGQGTLVTVSSGGGGSDIQMTQSPSSLSASVGDRVTITCRASQSVSSAVAWYQQKPGKAPKLLIYSASSLYSGVPSRFSGSRSGTDFTLTISSLQPEDFATYYCQQGVYLFTFGQGTKVEIKLEDKTHTKVEPKTSDKTHTCPPCPAPELLGGPSVFLFPPKPKDTLMISRTPEVTCVVVDVSHEDPEVKFNWYVDGVEVHNAKTKPREEQYNSTYRVVSVLTVLHQDWLNGKEYKCKVSNKALPAPIEKTISKAKGQPREPMVFDLPPSREEMTKNQVSLWCMVKGFYPSDIAVEWESNGQPENNYKTTPPVLDSDGSFFLYSKLTVDKSRWQQGNVFSCSVMHEALHNHYTQKSLSLSPGKSGSETPGTSESATPESGGGEVQLVESGGGLVQPGGSLRLSCAASGFNISYSSIHWVRQAPGKGLEWVAYISSYYGYTYYADSVKGRFTISADTSKNTAYLQMNSLRAEDTAVYYCARAHYFPWAGAMDYWGQGTLVTVSSGGGGSDIQMTQSPSSLSASVGDRVTITCRASQSVSSAVAWYQQKPGKAPKLLIYSASSLYSGVPSRFSGSRSGTDFTLTISSLQPEDFATYYCQQYYWPITFGQGTKVEIK

SEQ ID NO: 996 - protein, 746 aa, Artificial Sequence
  Description of Artificial Sequence: Synthetic polypeptide
MNLLLILTFVAAAVAEFEVQLVESGGGLVQPGGSLRLSCAASGFNIHSSSIHWVRQAPGKGLEWVAATYSSFGSITYADSVKGRFTISADTSKNTAYLQMNSLRAEDTAVYYCARYHHPFGYALDYWGQGTLVTVSSGGGGSDIQMTQSPSSLSASVGDRVTITCRASQSVSSAVAWYQQKPGKAPKLLIYSASSLYSGVPSRFSGSRSGTDFTLTISSLQPEDFATYYCQQGVYLFTFGQGTKVEIKLEDKTHTKVEPKSSDKTHNCPPCPAPELLGGPSVFLFPPKPKDTLMISRTPEVTCVVVDVSHEDPEVKFNWYVDGVEVHNAKTKPREEQYNSTYRVVSVLTVLHQDWLNGKEYKCKVSNKALPAPIEKTISKAKGQPREPQVYTLPPIRELMTSNQVSLSCAVKGFYPSDIAVEWESNGQPENNYKTTPPVLDSDGSFFLVSKLTVDKSRWQQGNVFSCSVMHEALHNHYTQKSLSLSPGKSGSETPGTSESATPESGGGEVQLVESGGGLVQPGGSLRLSCAASGFNISSYYIHWVRQAPGKGLEWVASIYSSYGYTSYADSVKGRFTISADTSKNTAYLQMNSLRAEDTAVYYCARTVRGSKKPYFSGWAMDYWGQGTLVTVSSGGGGSDIQMTQSPSSLSASVGDRVTITCRASQSVSSAVAWYQQKPGKAPKLLIYSASSLYSGVPSRFSGSRSGTDFTLTISSLQPEDFATYYCQQYSWGPFTFGQGTKVEIK

SEQ ID NO: 997 - protein, 740 aa, Artificial Sequence
  Description of Artificial Sequence: Synthetic polypeptide
MNLLLILTFVAAAVAEFEVQLVESGGGLVQPGGSLRLSCAASGFNIHSSSIHWVRQAPGKGLEWVAATYSSFGSITYADSVKGRFTISADTSKNTAYLQMNSLRAEDTAVYYCARYHHPFGYALDYWGQGTLVTVSSGGGGSDIQMTQSPSSLSASVGDRVTITCRASQSVSSAVAWYQQKPGKAPKLLIYSASSLYSGVPSRFSGSRSGTDFTLTISSLQPEDFATYYCQQGVYLFTFGQGTKVEIKLEDKTHTKVEPKTSDKTHTCPPCPAPELLGGPSVFLFPPKPKDTLMISRTPEVTCVVVDVSHEDPEVKFNWYVDGVEVHNAKTKPREEQYNSTYRVVSVLTVLHQDWLNGKEYKCKVSNKALPAPIEKTISKAKGQPREPMVFDLPPSREEMTKNQVSLWCMVKGFYPSDIAVEWESNGQPENNYKTTPPVLDSDGSFFLYSKLTVDKSRWQQGNVFSCSVMHEALHNHYTQKSLSLSPGKSGSETPGTSESATPESGGGEVQLVESGGGLVQPGGSLRLSCAASGFNISYSSIHWVRQAPGKGLEWVAYISSYYGYTYYADSVKGRFTISADTSKNTAYLQMNSLRAEDTAVYYCARAHYFPWAGAMDYWGQGTLVTVSSGGGGSDIQMTQSPSSLSASVGDRVTITCRASQSVSSAVAWYQQKPGKAPKLLIYSASSLYSGVPSRFSGSRSGTDFTLTISSLQPEDFATYYCQQYYWPITFGQGTKVEIK

SEQ ID NO: 998 - protein, 752 aa, Artificial Sequence
  Description of Artificial Sequence: Synthetic polypeptide
MNLLLILTFVAAAVAEFEVQLVESGGGLVQPGGSLRLSCAASGFNIGSSSIHWVRQAPGKGLEWVASIYSAFASTSYADSVKGRFTISADTSKNTAYLQMNSLRAEDTAVYYCARYHFPFGFALDYWGQGTLVTVSSGGGGSDIQMTQSPSSLSASVGDRVTITCRASQSVSSAVAWYQQKPGKAPKLLIYSASSLYSGVPSRFSGSRSGTDFTLTISSLQPEDFATYYCQQGVYLFTFGQGTKVEIKLEDKTHTKVEPKSSDKTHNCPPCPAPELLGGPSVFLFPPKPKDTLMISRTPEVTCVVVDVSHEDPEVKFNWYVDGVEVHNAKTKPREEQYNSTYRVVSVLTVLHQDWLNGKEYKCKVSNKALPAPIEKTISKAKGQPREPQVYTLPPIRELMTSNQVSLSCAVKGFYPSDIAVEWESNGQPENNYKTTPPVLDSDGSFFLVSKLTVDKSRWQQGNVFSCSVMHEALHNHYTQKSLSLSPGKSGSETPGTSESATPESGGGDIQMTQSPSSLSASVGDRVTITCRASQSVSSAVAWYQQKPGKAPKLLIYSASSLYSGVPSRFSGSRSGTDFTLTISSLQPEDFATYYCQQYSWGPFTFGQGTKVEIKGTTAASGSSGGSSSGAEVQLVESGGGLVQPGGSLRLSCAASGFNISYSSIHWVRQAPGKGLEWVAYISSYYGYTYYADSVKGRFTISADTSKNTAYLQMNSLRAEDTAVYYCARAHYFPWAGAMDYWGQGTLVTVSS

SEQ ID NO: 999 - protein, 752 aa, Artificial Sequence
  Description of Artificial Sequence: Synthetic polypeptide
MNLLLILTFVAAAVAEFEVQLVESGGGLVQPGGSLRLSCAASGFNIGSSSIHWVRQAPGKGLEWVASIYSAFASTSYADSVKGRFTISADTSKNTAYLQMNSLRAEDTAVYYCARYHFPFGFALDYWGQGTLVTVSSGGGGSDIQMTQSPSSLSASVGDRVTITCRASQSVSSAVAWYQQKPGKAPKLLIYSASSLYSGVPSRFSGSRSGTDFTLTISSLQPEDFATYYCQQGVYLFTFGQGTKVEIKLEDKTHTKVEPKTSDKTHTCPPCPAPELLGGPSVFLFPPKPKDTLMISRTPEVTCVVVDVSHEDPEVKFNWYVDGVEVHNAKTKPREEQYNSTYRVVSVLTVLHQDWLNGKEYKCKVSNKALPAPIEKTISKAKGQPREPMVFDLPPSREEMTKNQVSLWCMVKGFYPSDIAVEWESNGQPENNYKTTPPVLDSDGSFFLYSKLTVDKSRWQQGNVFSCSVMHEALHNHYTQKSLSLSPGKSGSETPGTSESATPESGGGDIQMTQSPSSLSASVGDRVTITCRASQSVSSAVAWYQQKPGKAPKLLIYSASSLYSGVPSRFSGSRSGTDFTLTISSLQPEDFATYYCQQYSWGPFTFGQGTKVEIKGTTAASGSSGGSSSGAEVQLVESGGGLVQPGGSLRLSCAASGFNISYSSIHWVRQAPGKGLEWVAYISSYYGYTYYADSVKGRFTISADTSKNTAYLQMNSLRAEDTAVYYCARAHYFPWAGAMDYWGQGTLVTVSS

SEQ ID NO: 1000 - protein, 756 aa, Artificial Sequence
  Description of Artificial Sequence: Synthetic polypeptide
MNLLLILTFVAAAVAEFEVQLVESGGGLVQPGGSLRLSCAASGFNIGSSSIHWVRQAPGKGLEWVASIYSAFASTSYADSVKGRFTISADTSKNTAYLQMNSLRAEDTAVYYCARYHFPFGFALDYWGQGTLVTVSSGGGGSDIQMTQSPSSLSASVGDRVTITCRASQSVSSAVAWYQQKPGKAPKLLIYSASSLYSGVPSRFSGSRSGTDFTLTISSLQPEDFATYYCQQGVYLFTFGQGTKVEIKLEDKTHTKVEPKSSDKTHNCPPCPAPELLGGPSVFLFPPKPKDTLMISRTPEVTCVVVDVSHEDPEVKFNWYVDGVEVHNAKTKPREEQYNSTYRVVSVLTVLHQDWLNGKEYKCKVSNKALPAPIEKTISKAKGQPREPQVYTLPPIRELMTSNQVSLSCAVKGFYPSDIAVEWESNGQPENNYKTTPPVLDSDGSFFLVSKLTVDKSRWQQGNVFSCSVMHEALHNHYTQKSLSLSPGKSGSETPGTSESATPESGGGDIQMTQSPSSLSASVGDRVTITCRASQSVSSAVAWYQQKPGKAPKLLIYSASSLYSGVPSRFSGSRSGTDFTLTISSLQPEDFATYYCQQYYWPITFGQGTKVEIKGTTAASGSSGGSSSGAEVQLVESGGGLVQPGGSLRLSCAASGFNISSYYIHWVRQAPGKGLEWVASIYSSYGYTSYADSVKGRFTISADTSKNTAYLQMNSLRAEDTAVYYCARTVRGSKKPYFSGWAMDYWGQGTLVTVSS

SEQ ID NO: 1001 - protein, 756 aa, Artificial Sequence
  Description of Artificial Sequence: Synthetic polypeptide
MNLLLILTFVAAAVAEFEVQLVESGGGLVQPGGSLRLSCAASGFNIGSSSIHWVRQAPGKGLEWVASIYSAFASTSYADSVKGRFTISADTSKNTAYLQMNSLRAEDTAVYYCARYHFPFGFALDYWGQGTLVTVSSGGGGSDIQMTQSPSSLSASVGDRVTITCRASQSVSSAVAWYQQKPGKAPKLLIYSASSLYSGVPSRFSGSRSGTDFTLTISSLQPEDFATYYCQQGVYLFTFGQGTKVEIKLEDKTHTKVEPKTSDKTHTCPPCPAPELLGGPSVFLFPPKPKDTLMISRTPEVTCVVVDVSHEDPEVKFNWYVDGVEVHNAKTKPREEQYNSTYRVVSVLTVLHQDWLNGKEYKCKVSNKALPAPIEKTISKAKGQPREPMVFDLPPSREEMTKNQVSLWCMVKGFYPSDIAVEWESNGQPENNYKTTPPVLDSDGSFFLYSKLTVDKSRWQQGNVFSCSVMHEALHNHYTQKSLSLSPGKSGSETPGTSESATPESGGGDIQMTQSPSSLSASVGDRVTITCRASQSVSSAVAWYQQKPGKAPKLLIYSASSLYSGVPSRFSGSRSGTDFTLTISSLQPEDFATYYCQQYYWPITFGQGTKVEIKGTTAASGSSGGSSSGAEVQLVESGGGLVQPGGSLRLSCAASGFNISSYYIHWVRQAPGKGLEWVASIYSSYGYTSYADSVKGRFTISADTSKNTAYLQMNSLRAEDTAVYYCARTVRGSKKPYFSGWAMDYWGQGTLVTVSS

SEQ ID NO: 1002 - protein, 757 aa, Artificial Sequence
  Description of Artificial Sequence: Synthetic polypeptide
MNLLLILTFVAAAVAEFEVQLVESGGGLVQPGGSLRLSCAASGFNISSYYIHWVRQAPGKGLEWVASIYSSYGYTSYADSVKGRFTISADTSKNTAYLQMNSLRAEDTAVYYCARTVRGSKKPYFSGWAMDYWGQGTLVTVSSGGGGSDIQMTQSPSSLSASVGDRVTITCRASQSVSSAVAWYQQKPGKAPKLLIYSASSLYSGVPSRFSGSRSGTDFTLTISSLQPEDFATYYCQQYSWGPFTFGQGTKVEIKLEDKTHTKVEPKSSDKTHNCPPCPAPELLGGPSVFLFPPKPKDTLMISRTPEVTCVVVDVSHEDPEVKFNWYVDGVEVHNAKTKPREEQYNSTYRVVSVLTVLHQDWLNGKEYKCKVSNKALPAPIEKTISKAKGQPREPQVYTLPPIRELMTSNQVSLSCAVKGFYPSDIAVEWESNGQPENNYKTTPPVLDSDGSFFLVSKLTVDKSRWQQGNVFSCSVMHEALHNHYTQKSLSLSPGKSGSETPGTSESATPESGGGEVQLVESGGGLVQPGGSLRLSCAASGFNIHSSSIHWVRQAPGKGLEWVAATYSSFGSITYADSVKGRFTISADTSKNTAYLQMNSLRAEDTAVYYCARYHHPFGYALDYWGQGTLVTVSSGTTAASGSSGGSSSGADIQMTQSPSSLSASVGDRVTITCRASQSVSSAVAWYQQKPGKAPKLLIYSASSLYSGVPSRFSGSRSGTDFTLTISSLQPEDFATYYCQQGVYLFTFGQGTKVEIK

SEQ ID NO: 1003 - protein, 750 aa, Artificial Sequence
  Description of Artificial Sequence: Synthetic polypeptide
MNLLLILTFVAAAVAEFEVQLVESGGGLVQPGGSLRLSCAASGFNISYSSIHWVRQAPGKGLEWVAYISSYYGYTYYADSVKGRFTISADTSKNTAYLQMNSLRAEDTAVYYCARAHYFPWAGAMDYWGQGTLVTVSSGGGGDIQMTQSPSSLSASVGDRVTITCRASQSVSSAVAWYQQKPGKAPKLLIYSASSLYSGVPSRFSGSRSGTDFTLTISSLQPEDFATYYCQQYYWPITFGQGTKVEIKLEDKTHTKVEPKTSDKTHTCPPCPAPELLGGPSVFLFPPKPKDTLMISRTPEVTCVVVDVSHEDPEVKFNWYVDGVEVHNAKTKPREEQYNSTYRVVSVLTVLHQDWLNGKEYKCKVSNKALPAPIEKTISKAKGQPREPMVFDLPPSREEMTKNQVSLWCMVKGFYPSDIAVEWESNGQPENNYKTTPPVLDSDGSFFLYSKLTVDKSRWQQGNVFSCSVMHEALHNHYTQKSLSLSPGKSGSETPGTSESATPESGGGEVQLVESGGGLVQPGGSLRLSCAASGFNIHSSSIHWVRQAPGKGLEWVAATYSSFGSITYADSVKGRFTISADTSKNTAYLQMNSLRAEDTAVYYCARYHHPFGYALDYWGQGTLVTVSSGTTAASGSSGGSSSGADIQMTQSPSSLSASVGDRVTITCRASQSVSSAVAWYQQKPGKAPKLLIYSASSLYSGVPSRFSGSRSGTDFTLTISSLQPEDFATYYCQQGVYLFTFGQGTKVEIK

SEQ ID NO: 1004 - protein, 757 aa, Artificial Sequence
  Description of Artificial Sequence: Synthetic polypeptide
MNLLLILTFVAAAVAEFDIQMTQSPSSLSASVGDRVTITCRASQSVSSAVAWYQQKPGKAPKLLIYSASSLYSGVPSRFSGSRSGTDFTLTISSLQPEDFATYYCQQGVYLFTFGQGTKVEIKGTTAASGSSGGSSSGAEVQLVESGGGLVQPGGSLRLSCAASGFNIGSSSIHWVRQAPGKGLEWVASIYSAFASTSYADSVKGRFTISADTSKNTAYLQMNSLRAEDTAVYYCARYHFPFGFALDYWGQGTLVTVSSLEDKTHTKVEPKSSDKTHNCPPCPAPELLGGPSVFLFPPKPKDTLMISRTPEVTCVVVDVSHEDPEVKFNWYVDGVEVHNAKTKPREEQYNSTYRVVSVLTVLHQDWLNGKEYKCKVSNKALPAPIEKTISKAKGQPREPQVYTLPPIRELMTSNQVSLSCAVKGFYPSDIAVEWESNGQPENNYKTTPPVLDSDGSFFLVSKLTVDKSRWQQGNVFSCSVMHEALHNHYTQKSLSLSPGKSGSETPGTSESATPESGGGEVQLVESGGGLVQPGGSLRLSCAASGFNISSYYIHWVRQAPGKGLEWVASIYSSYGYTSYADSVKGRFTISADTSKNTAYLQMNSLRAEDTAVYYCARTVRGSKKPYFSGWAMDYWGQGTLVTVSSGGGGSDIQMTQSPSSLSASVGDRVTITCRASQSVSSAVAWYQQKPGKAPKLLIYSASSLYSGVPSRFSGSRSGTDFTLTISSLQPEDFATYYCQQYSWGPFTFGQGTKVEIK

SEQ ID NO: 1005 - protein, 751 aa, Artificial Sequence
  Description of Artificial Sequence: Synthetic polypeptide
MNLLLILTFVAAAVAEFDIQMTQSPSSLSASVGDRVTITCRASQSVSSAVAWYQQKPGKAPKLLIYSASSLYSGVPSRFSGSRSGTDFTLTISSLQPEDFATYYCQQGVYLFTFGQGTKVEIKGTTAASGSSGGSSSGAEVQLVESGGGLVQPGGSLRLSCAASGFNIGSSSIHWVRQAPGKGLEWVASIYSAFASTSYADSVKGRFTISADTSKNTAYLQMNSLRAEDTAVYYCARYHFPFGFALDYWGQGTLVTVSSLEDKTHTKVEPKTSDKTHTCPPCPAPELLGGPSVFLFPPKPKDTLMISRTPEVTCVVVDVSHEDPEVKFNWYVDGVEVHNAKTKPREEQYNSTYRVVSVLTVLHQDWLNGKEYKCKVSNKALPAPIEKTISKAKGQPREPMVFDLPPSREEMTKNQVSLWCMVKGFYPSDIAVEWESNGQPENNYKTTPPVLDSDGSFFLYSKLTVDKSRWQQGNVFSCSVMHEALHNHYTQKSLSLSPGKSGSETPGTSESATPESGGGEVQLVESGGGLVQPGGSLRLSCAASGFNISYSSIHWVRQAPGKGLEWVAYISSYYGYTYYADSVKGRFTISADTSKNTAYLQMNSLRAEDTAVYYCARAHYFPWAGAMDYWGQGTLVTVSSGGGGSDIQMTQSPSSLSASVGDRVTITCRASQSVSSAVAWYQQKPGKAPKLLIYSASSLYSGVPSRFSGSRSGTDFTLTISSLQPEDFATYYCQQYYWPITFGQGTKVEIK

SEQ ID NO: 1006 - protein, 767 aa, Artificial Sequence
  Description of Artificial Sequence: Synthetic polypeptide
MNLLLILTFVAAAVAEFDIQMTQSPSSLSASVGDRVTITCRASQSVSSAVAWYQQKPGKAPKLLIYSASSLYSGVPSRFSGSRSGTDFTLTISSLQPEDFATYYCQQGVYLFTFGQGTKVEIKGTTAASGSSGGSSSGAEVQLVESGGGLVQPGGSLRLSCAASGFNIGSSSIHWVRQAPGKGLEWVASIYSAFASTSYADSVKGRFTISADTSKNTAYLQMNSLRAEDTAVYYCARYHFPFGFALDYWGQGTLVTVSSLEDKTHTKVEPKSSDKTHNCPPCPAPELLGGPSVFLFPPKPKDTLMISRTPEVTCVVVDVSHEDPEVKFNWYVDGVEVHNAKTKPREEQYNSTYRVVSVLTVLHQDWLNGKEYKCKVSNKALPAPIEKTISKAKGQPREPQVYTLPPIRELMTSNQVSLSCAVKGFYPSDIAVEWESNGQPENNYKTTPPVLDSDGSFFLVSKLTVDKSRWQQGNVFSCSVMHEALHNHYTQKSLSLSPGKSGSETPGTSESATPESGGGDIQMTQSPSSLSASVGDRVTITCRASQSVSSAVAWYQQKPGKAPKLLIYSASSLYSGVPSRFSGSRSGTDFTLTISSLQPEDFATYYCQQYYWPITFGQGTKVEIKGTTAASGSSGGSSSGAEVQLVESGGGLVQPGGSLRLSCAASGFNISSYYIHWVRQAPGKGLEWVASIYSSYGYTSYADSVKGRFTISADTSKNTAYLQMNSLRAEDTAVYYCARTVRGSKKPYFSGWAMDYWGQGTLVTVSS

SEQ ID NO: 1007 - protein, 763 aa, Artificial Sequence
  Description of Artificial Sequence: Synthetic polypeptide
MNLLLILTFVAAAVAEFDIQMTQSPSSLSASVGDRVTITCRASQSVSSAVAWYQQKPGKAPKLLIYSASSLYSGVPSRFSGSRSGTDFTLTISSLQPEDFATYYCQQGVYLFTFGQGTKVEIKGTTAASGSSGGSSSGAEVQLVESGGGLVQPGGSLRLSCAASGFNIGSSSIHWVRQAPGKGLEWVASIYSAFASTSYADSVKGRFTISADTSKNTAYLQMNSLRAEDTAVYYCARYHFPFGFALDYWGQGTLVTVSSLEDKTHTKVEPKTSDKTHTCPPCPAPELLGGPSVFLFPPKPKDTLMISRTPEVTCVVVDVSHEDPEVKFNWYVDGVEVHNAKTKPREEQYNSTYRVVSVLTVLHQDWLNGKEYKCKVSNKALPAPIEKTISKAKGQPREPMVFDLPPSREEMTKNQVSLWCMVKGFYPSDIAVEWESNGQPENNYKTTPPVLDSDGSFFLYSKLTVDKSRWQQGNVFSCSVMHEALHNHYTQKSLSLSPGKSGSETPGTSESATPESGGGDIQMTQSPSSLSASVGDRVTITCRASQSVSSAVAWYQQKPGKAPKLLIYSASSLYSGVPSRFSGSRSGTDFTLTISSLQPEDFATYYCQQYSWGPFTFGQGTKVEIKGTTAASGSSGGSSSGAEVQLVESGGGLVQPGGSLRLSCAASGFNISYSSIHWVRQAPGKGLEWVAYISSYYGYTYYADSVKGRFTISADTSKNTAYLQMNSLRAEDTAVYYCARAHYFPWAGAMDYWGQGTLVTVSS

SEQ ID NO: 1008 - protein, 228 aa, Artificial Sequence
  Description of Artificial Sequence: Synthetic polypeptide
MNLLLILTFVAAAVADIQMTQSPSSLSASVGDRVTITCRASQSVSSAVAWYQQKPGKAPKLLIYSASSLYSGVPSRFSGSRSGTDFTLTISSLQPEDFATYYCQQGVYLFTFGQGTKVEIKRTVAAPSVFIFPPSDEQLKSGTASVVCLLNNFYPREAKVQWKVDNALQSGNSQESVTEQDSKDSTYSLSSTLTLSKADYEKHKVYACEVTHQGLSSPVTKSFNRGEC

SEQ ID NO: 1009 - protein, 722 aa, Artificial Sequence
  Description of Artificial Sequence: Synthetic polypeptide
MNLLLILTFVAAAVAEVQLVESGGGLVQPGGSLRLSCAASGFNIHSSSIHWVRQAPGKGLEWVAATYSSFGSITYADSVKGRFTISADTSKNTAYLQMNSLRAEDTAVYYCARYHHPFGYALDYWGQGTLVTVSSASTKGPSVFPLAPSSKSTSGGTAALGCLVKDYFPEPVTVSWNSGALTSGVHTFPAVLQSSGLYSLSSVVTVPSSSLGTQTYICNVNHKPSNTKVDKKVEPKSCDKTHTCPPCPAPELLGGPSVFLFPPKPKDTLMISRTPEVTCVVVDVSHEDPEVKFNWYVDGVEVHNAKTKPREEQYNSTYRVVSVLTVLHQDWLNGKEYKCKVSNKALPAPIEKTISKAKGQPREPQVYTLPPIRELMTSNQVSLSCAVKGFYPSDIAVEWESNGQPENNYKTTPPVLDSDGSFFLVSKLTVDKSRWQQGNVFSCSVMHEALHNHYTQKSLSLSPGKSGSETPGTSESATPESGGGEVQLVESGGGLVQPGGSLRLSCAASGFNISSYYIHWVRQAPGKGLEWVASIYSSYGYTSYADSVKGRFTISADTSKNTAYLQMNSLRAEDTAVYYCARTVRGSKKPYFSGWAMDYWGQGTLVTVSSGGGGSDIQMTQSPSSLSASVGDRVTITCRASQSVSSAVAWYQQKPGKAPKLLIYSASSLYSGVPSRFSGSRSGTDFTLTISSLQPEDFATYYCQQYSWGPFTFGQGTKVEIK

SEQ ID NO: 1010 - protein, 716 aa, Artificial Sequence
  Description of Artificial Sequence: Synthetic polypeptide
MNLLLILTFVAAAVAEVQLVESGGGLVQPGGSLRLSCAASGFNIHSSSIHWVRQAPGKGLEWVAATYSSFGSITYADSVKGRFTISADTSKNTAYLQMNSLRAEDTAVYYCARYHHPFGYALDYWGQGTLVTVSSASTKGPSVFPLAPSSKSTSGGTAALGCLVKDYFPEPVTVSWNSGALTSGVHTFPAVLQSSGLYSLSSVVTVPSSSLGTQTYICNVNHKPSNTKVDKKVEPKSCDKTHTCPPCPAPELLGGPSVFLFPPKPKDTLMISRTPEVTCVVVDVSHEDPEVKFNWYVDGVEVHNAKTKPREEQYNSTYRVVSVLTVLHQDWLNGKEYKCKVSNKALPAPIEKTISKAKGQPREPMVFDLPPSREEMTKNQVSLWCMVKGFYPSDIAVEWESNGQPENNYKTTPPVLDSDGSFFLYSKLTVDKSRWQQGNVFSCSVMHEALHNHYTQKSLSLSPGKSGSETPGTSESATPESGGGEVQLVESGGGLVQPGGSLRLSCAASGFNISYSSIHWVRQAPGKGLEWVAYISSYYGYTYYADSVKGRFTISADTSKNTAYLQMNSLRAEDTAVYYCARAHYFPWAGAMDYWGQGTLVTVSSGGGGSDIQMTQSPSSLSASVGDRVTITCRASQSVSSAVAWYQQKPGKAPKLLIYSASSLYSGVPSRFSGSRSGTDFTLTISSLQPEDFATYYCQQYYWPITFGQGTKVEIK

SEQ ID NO: 1011 - protein, 717 aa, Artificial Sequence
  Description of Artificial Sequence: Synthetic polypeptide
MNLLLILTFVAAAVAEVQLVESGGGLVQPGGSLRLSCAASGFNIHSSSIHWVRQAPGKGLEWVAATYSSFGSITYADSVKGRFTISADTSKNTAYLQMNSLRAEDTAVYYCARYHHPFGYALDYWGQGTLVTVSSASTKGPSVFPLAPSSKSTSGGTAALGCLVKDYFPEPVTVSWNSGALTSGVHTFPAVLQSSGLYSLSSVVTVPSSSLGTQTYICNVNHKPSNTKVDKKVEPKSCDKTHTCPPCPAPELLGGPSVFLFPPKPKDTLMISRTPEVTCVVVDVSHEDPEVKFNWYVDGVEVHNAKTKPREEQYNSTYRVVSVLTVLHQDWLNGKEYKCKVSNKALPAPIEKTISKAKGQPREPQVYTLPPSREEMTKNQVSLTCLVKGFYPSDIAVEWESNGQPENNYKTTPPVLDSDGSFFLYSKLTVDKSRWQQGNVFSCSVMHEALHNHYTQKSLSLSPGKSGSETPGTSESATPESGGGEVQLVESGGGLVQPGGSLRLSCAASGFNISYSSIHWVRQAPGKGLEWVAYISSYYGYTYYADSVKGRFTISADTSKNTAYLQMNSLRAEDTAVYYCARAHYFPWAGAMDYWGQGTLVTVSSGGGGSDIQMTQSPSSLSASVGDRVTITCRASQSVSSAVAWYQQKPGKAPKLLIYSASSLYSGVPSRFSGSRSGTDFTLTISSLQPEDFATYYCQQYSWGPFTFGQGTKVEIK

SEQ ID NO: 1012 - protein, 728 aa, Artificial Sequence
  Description of Artificial Sequence: Synthetic polypeptide
MNLLLILTFVAAAVAEVQLVESGGGLVQPGGSLRLSCAASGFNIHSSSIHWVRQAPGKGLEWVAATYSSFGSITYADSVKGRFTISADTSKNTAYLQMNSLRAEDTAVYYCARYHHPFGYALDYWGQGTLVTVSSASTKGPSVFPLAPSSKSTSGGTAALGCLVKDYFPEPVTVSWNSGALTSGVHTFPAVLQSSGLYSLSSVVTVPSSSLGTQTYICNVNHKPSNTKVDKKVEPKSCDKTHTCPPCPAPELLGGPSVFLFPPKPKDTLMISRTPEVTCVVVDVSHEDPEVKFNWYVDGVEVHNAKTKPREEQYNSTYRVVSVLTVLHQDWLNGKEYKCKVSNKALPAPIEKTISKAKGQPREPQVYTLPPSREEMTKNQVSLTCLVKGFYPSDIAVEWESNGQPENNYKTTPPVLDSDGSFFLYSKLTVDKSRWQQGNVFSCSVMHEALHNHYTQKSLSLSPGKSGSETPGTSESATPESGGGDIQMTQSPSSLSASVGDRVTITCRASQSVSSAVAWYQQKPGKAPKLLIYSASSLYSGVPSRFSGSRSGTDFTLTISSLQPEDFATYYCQQYSWGPFTFGQGTKVEIKGTTAASGSSGGSSSGAEVQLVESGGGLVQPGGSLRLSCAASGFNISYSSIHWVRQAPGKGLEWVAYISSYYGYTYYADSVKGRFTISADTSKNTAYLQMNSLRAEDTAVYYCARAHYFPWAGAMDYWGQGTLVTVSS

SEQ ID NO: 1013 - protein, 732 aa, Artificial Sequence
  Description of Artificial Sequence: Synthetic polypeptide
MNLLLILTFVAAAVAEVQLVESGGGLVQPGGSLRLSCAASGFNIHSSSIHWVRQAPGKGLEWVAATYSSFGSITYADSVKGRFTISADTSKNTAYLQMNSLRAEDTAVYYCARYHHPFGYALDYWGQGTLVTVSSASTKGPSVFPLAPSSKSTSGGTAALGCLVKDYFPEPVTVSWNSGALTSGVHTFPAVLQSSGLYSLSSVVTVPSSSLGTQTYICNVNHKPSNTKVDKKVEPKSCDKTHTCPPCPAPELLGGPSVFLFPPKPKDTLMISRTPEVTCVVVDVSHEDPEVKFNWYVDGVEVHNAKTKPREEQYNSTYRVVSVLTVLHQDWLNGKEYKCKVSNKALPAPIEKTISKAKGQPREPQVYTLPPSREEMTKNQVSLTCLVKGFYPSDIAVEWESNGQPENNYKTTPPVLDSDGSFFLYSKLTVDKSRWQQGNVFSCSVMHEALHNHYTQKSLSLSPGKSGSETPGTSESATPESGGGDIQMTQSPSSLSASVGDRVTITCRASQSVSSAVAWYQQKPGKAPKLLIYSASSLYSGVPSRFSGSRSGTDFTLTISSLQPEDFATYYCQQYYWPITFGQGTKVEIKGTTAASGSSGGSSSGAEVQLVESGGGLVQPGGSLRLSCAASGFNISSYYIHWVRQAPGKGLEWVASIYSSYGYTSYADSVKGRFTISADTSKNTAYLQMNSLRAEDTAVYYCARTVRGSKKPYFSGWAMDYWGQGTLVTVSS

SEQ ID NO: 1014 - protein, 742 aa, Artificial Sequence
  Description of Artificial Sequence: Synthetic polypeptide
MNLLLILTFVAAAVAEFEVQLVESGGGLVQPGGSLRLSCAASGFNISSYYIHWVRQAPGKGLEWVASIYSSYGYTSYADSVKGRFTISADTSKNTAYLQMNSLRAEDTAVYYCARTVRGSKKPYFSGWAMDYWGQGTLVTVSSGGGGSDIQMTQSPSSLSASVGDRVTITCRASQSVSSAVAWYQQKPGKAPKLLIYSASSLYSGVPSRFSGSRSGTDFTLTISSLQPEDFATYYCQQYYFLITFGQGTKVEIKLEDKTHTKVEPKSSDKTHNCPPCPAPELLGGPSVFLFPPKPKDTLMISRTPEVTCVVVDVSHEDPEVKFNWYVDGVEVHNAKTKPREEQYNSTYRVVSVLTVLHQDWLNGKEYKCKVSNKALPAPIEKTISKAKGQPREPQVYTLPPIRELMTSNQVSLSCAVKGFYPSDIAVEWESNGQPENNYKTTPPVLDSDGSFFLVSKLTVDKSRWQQGNVFSCSVMHEALHNHYTQKSLSLSPGKSGSETPGTSESATPESGGGEVQLVESGGGLVQPGGSLRLSCAASGFNIHSSSIHWVRQAPGKGLEWVAATYSSFGSITYADSVKGRFTISADTSKNTAYLQMNSLRAEDTAVYYCARYHHPFGYALDYWGQGTLVTVSSASTKGPSVFPLAPSSKSTSGGTAALGCLVKDYFPEPVTVSWNSGALTSGVHTFPAVLQSSGLYSLSSVVTVPSSSLGTQTYICNVNHKPSNTKVDKKVEPKSCDKTHT

SEQ ID NO: 1015 - protein, 737 aa, Artificial Sequence
  Description of Artificial Sequence: Synthetic polypeptide
MNLLLILTFVAAAVAEFEVQLVESGGGLVQPGGSLRLSCAASGFNISYSSIHWVRQAPGKGLEWVASISPYYGYTYYADSVKGRFTISADTSKNTAYLQMNSLRAEDTAVYYCARSSYFPWFSAMDYWGQGTLVTVSSGGGGSDIQMTQSPSSLSASVGDRVTITCRASQSVSSAVAWYQQKPGKAPKLLIYSASSLYSGVPSRFSGSRSGTDFTLTISSLQPEDFATYYCQQYYWPITFGQGTKVEIKLEDKTHTKVEPKTSDKTHTCPPCPAPELLGGPSVFLFPPKPKDTLMISRTPEVTCVVVDVSHEDPEVKFNWYVDGVEVHNAKTKPREEQYNSTYRVVSVLTVLHQDWLNGKEYKCKVSNKALPAPIEKTISKAKGQPREPMVFDLPPSREEMTKNQVSLWCMVKGFYPSDIAVEWESNGQPENNYKTTPPVLDSDGSFFLYSKLTVDKSRWQQGNVFSCSVMHEALHNHYTQKSLSLSPGKSGSETPGTSESATPESGGGEVQLVESGGGLVQPGGSLRLSCAASGFNIHSSSIHWVRQAPGKGLEWVAATYSSFGSITYADSVKGRFTISADTSKNTAYLQMNSLRAEDTAVYYCARYHHPFGYALDYWGQGTLVTVSSASTKGPSVFPLAPSSKSTSGGTAALGCLVKDYFPEPVTVSWNSGALTSGVHTFPAVLQSSGLYSLSSVVTVPSSSLGTQTYICNVNHKPSNTKVDKKVEPKSCDKTHT

SEQ ID NO: 1016 - protein, 480 aa, Artificial Sequence
  Description of Artificial Sequence: Synthetic polypeptide
MNLLLILTFVAAAVAEVQLVESGGGLVQPGGSLRLSCAASGFNIHSSSIHWVRQAPGKGLEWVAATYSSFGSITYADSVKGRFTISADTSKNTAYLQMNSLRAEDTAVYYCARYHHPFGYALDYWGQGTLVTVSSASTKGPSVFPLAPSSKSTSGGTAALGCLVKDYFPEPVTVSWNSGALTSGVHTFPAVLQSSGLYSLSSVVTVPSSSLGTQTYICNVNHKPSNTKVDKKVEPKSCDKTHTGGSGGEVQLVESGGGLVQPGGSLRLSCAASGFTISYSSIHWVRQAPGKGLEWVASISPYYGYTYYADSVKGRFTISADTSKNTAYLQMNSLRAEDTAVYYCARSSYFPWFSAMDYWGQGTLVTVSSGGGGSDIQMTQSPSSLSASVGDRVTITCRASQSVSSAVAWYQQKPGKAPKLLIYSASSLYSGVPSRFSGSRSGTDFTLTISSLQPEDFATYYCQQYYWPITFGQGTKVEIK

SEQ ID NO: 1017 - protein, 470 aa, Artificial Sequence
  Description of Artificial Sequence: Synthetic polypeptide
MNLLLILTFVAAAVADIQMTQSPSSLSASVGDRVTITCRASQSVSSAVAWYQQKPGKAPKLLIYSASSLYSGVPSRFSGSRSGTDFTLTISSLQPEDFATYYCQQGVYLFTFGQGTKVEIKRTVAAPSVFIFPPSDEQLKSGTASVVCLLNNFYPREAKVQWKVDNALQSGNSQESVTEQDSKDSTYSLSSTLTLSKADYEKHKVYACEVTHQGLSSPVTKSFNRGECGGGGSEVQLVESGGGLVQPGGSLRLSCAASGFTISSYYIHWVRQAPGKGLEWVASIYSSYGYTSYADSVKGRFTISADTSKNTAYLQMNSLRAEDTAVYYCARTVRGSKKPYFSGWAMDYWGQGTLVTVSSGGGGSDIQMTQSPSSLSASVGDRVTITCRASQSVSSAVAWYQQKPGKAPKLLIYSASSLYSGVPSRFSGSRSGTDFTLTISSLQPEDFATYYCQQYYFLITFGQGTKVEIK

SEQ ID NO: 1018 - protein, 629 aa, Artificial Sequence
  Description of Artificial Sequence: Synthetic polypeptide
MNLLLILTFVAAAVAEFEVQLVESGGGLVQPGGSLRLSCAASGFNIGSSSIHWVRQAPGKGLEWVASIYSAFASTSYADSVKGRFTISADTSKNTAYLQMNSLRAEDTAVYYCARYHFPFGFALDYWGQGTLVTVSSGGGGSDIQMTQSPSSLSASVGDRVTITCRASQSVSSAVAWYQQKPGKAPKLLIYSASSLYSGVPSRFSGSRSGTDFTLTISSLQPEDFATYYCQQGVYLFTFGQGTKVEIKDKTHTKVEPKTSDKTHTCPPCPGQPREPQVYTLPPSREEMTKNQVSLTCLVKGFYPSDIAVEWESNGQPENNYKTTPPVLDSDGSFFLYSKLTVDKSRWQQGNVFSCSVMHEALHNHYTQKSLSLSPGKGTTAASGSSGGSSSGAGRTEVQLVESGGGLVQPGGSLRLSCAASGFNISYSSIHWVRQAPGKGLEWVAYISSYYGYTYYADSVKGRFTISADTSKNTAYLQMNSLRAEDTAVYYCARAHYFPWAGAMDYWGQGTLVTVSSGGGGSDIQMTQSPSSLSASVGDRVTITCRASQSVSSAVAWYQQKPGKAPKLLIYSASSLYSGVPSRFSGSRSGTDFTLTISSLQPEDFATYYCQQYSWGPFTFGQGTKVEIK

SEQ ID NO: 1019 - protein, 738 aa, Artificial Sequence
  Description of Artificial Sequence: Synthetic polypeptide
EVQLVESGGGLVQPGGSLRLSCAASGFNISYSYMHWVRQAPGKGLEWVASISPYYSYTSYADSVKGRFTISADTSKNTAYLQMNSLRAEDTAVYYCARPSAWSHYYPSSSSSAFDYWGQGTLVTVSSGGGGSDIQMTQSPSSLSASVGDRVTITCRASQSVSSAVAWYQQKPGKAPKLLIYSASSLYSGVPSRFSGSRSGTDFTLTISSLQPEDFATYYCQQSSYSLITFGQGTKVEIKLEDKTHTKVEPKSSDKTHTCPPCPAPELLGGPSVFLFPPKPKDTLMISRTPEVTCVVVDVSHEDPEVKFNWYVDGVEVHNAKTKPREEQYNSTYRVVSVLTVLHQDWLNGKEYKCKVSNKALPAPIEKTISKAKGQPREPQVYTLPPSREEMTKNQVSLTCLVKGFYPSDIAVEWESNGQPENNYKTTPPVLDSDGSFFLYSKLTVDKSRWQQGNVFSCSVMHEALHNHYTQKSLSLSPGKSGSETPGTSESATPESGGGEVQLVESGGGLVQPGGSLRLSCAASGFNISYSYMHWVRQAPGKGLEWVASISPYYSYTSYADSVKGRFTISADTSKNTAYLQMNSLRAEDTAVYYCARPSAWSHYYPSSSSSAFDYWGQGTLVTVSSGGGGSDIQMTQSPSSLSASVGDRVTITCRASQSVSSAVAWYQQKPGKAPKLLIYSASSLYSGVPSRFSGSRSGTDFTLTISSLQPEDFATYYCQQSSYSLITFGQGTKVEIK

SEQ ID NO: 1020 - protein, 740 aa, Artificial Sequence
  Description of Artificial Sequence: Synthetic polypeptide
MNLLLILTFVAAAVAEFEVQLVESGGGLVQPGGSLRLSCAASGFNIYYSSIHWVRQAPGKGLEWVASIYPYYGYTYYADSVKGRFTISADTSKNTAYLQMNSLRAEDTAVYYCARYYHYGLDYWGQGTLVTVSSGGGGSDIQMTQSPSSLSASVGDRVTITCRASQSVSSAVAWYQQKPGKAPKLLIYSASSLYSGVPSRFSGSRSGTDFTLTISSLQPEDFATYYCQQSYWHSYLITFGQGTKVEIKLEDKTHTKVEPKTSDKTHTCPPCPAPELLGGPSVFLFPPKPKDTLMISRTPEVTCVVVDVSHEDPEVKFNWYVDGVEVHNAKTKPREEQYNSTYRVVSVLTVLHQDWLNGKEYKCKVSNKALPAPIEKTISKAKGQPREPMVFDLPPSREEMTKNQVSLWCMVKGFYPSDIAVEWESNGQPENNYKTTPPVLDSDGSFFLYSKLTVDKSRWQQGNVFSCSVMHEALHNHYTQKSLSLSPGKSGSETPGTSESATPESGGGEVQLVESGGGLVQPGGSLRLSCAASGFNISYSSIHWVRQAPGKGLEWVAYISSYYGYTYYADSVKGRFTISADTSKNTAYLQMNSLRAEDTAVYYCARAHYFPWAGAMDYWGQGTLVTVSSGGGGSDIQMTQSPSSLSASVGDRVTITCRASQSVSSAVAWYQQKPGKAPKLLIYSASSLYSGVPSRFSGSRSGTDFTLTISSLQPEDFATYYCQQYYWPITFGQGTKVEIK

SEQ ID NO: 1021 - protein, 746 aa, Artificial Sequence
  Description of Artificial Sequence: Synthetic polypeptide
MNLLLILTFVAAAVAEFEVQLVESGGGLVQPGGSLRLSCAASGFNIYYSSIHWVRQAPGKGLEWVASIYPYYGYTYYADSVKGRFTISADTSKNTAYLQMNSLRAEDTAVYYCARYYHYGLDYWGQGTLVTVSSGGGGSDIQMTQSPSSLSASVGDRVTITCRASQSVSSAVAWYQQKPGKAPKLLIYSASSLYSGVPSRFSGSRSGTDFTLTISSLQPEDFATYYCQQSYWHSYLITFGQGTKVEIKLEDKTHTKVEPKSSDKTHNCPPCPAPELLGGPSVFLFPPKPKDTLMISRTPEVTCVVVDVSHEDPEVKFNWYVDGVEVHNAKTKPREEQYNSTYRVVSVLTVLHQDWLNGKEYKCKVSNKALPAPIEKTISKAKGQPREPQVYTLPPIRELMTSNQVSLSCAVKGFYPSDIAVEWESNGQPENNYKTTPPVLDSDGSFFLVSKLTVDKSRWQQGNVFSCSVMHEALHNHYTQKSLSLSPGKSGSETPGTSESATPESGGGEVQLVESGGGLVQPGGSLRLSCAASGFNISSYYIHWVRQAPGKGLEWVASIYSSYGYTSYADSVKGRFTISADTSKNTAYLQMNSLRAEDTAVYYCARTVRGSKKPYFSGWAMDYWGQGTLVTVSSGGGGSDIQMTQSPSSLSASVGDRVTITCRASQSVSSAVAWYQQKPGKAPKLLIYSASSLYSGVPSRFSGSRSGTDFTLTISSLQPEDFATYYCQQYSWGPFTFGQGTKVEIK

SEQ ID NO: 1022 - protein, 736 aa, Artificial Sequence
  Description of Artificial Sequence: Synthetic polypeptide
MNLLLILTFVAAAVAEFEVQLVESGGGLVQPGGSLRLSCAASGFNISYSSIHWVRQAPGKGLEWVASIYPSYSSTYYADSVKGRFTISADTSKNTAYLQMNSLRAEDTAVYYCARYYAMDYWGQGTLVTVSSGGGGSDIQMTQSPSSLSASVGDRVTITCRASQSVSSAVAWYQQKPGKAPKLLIYSASSLYSGVPSRFSGSRSGTDFTLTISSLQPEDFATYYCQQAFYYPITFGQGTKVEIKLEDKTHTKVEPKTSDKTHTCPPCPAPELLGGPSVFLFPPKPKDTLMISRTPEVTCVVVDVSHEDPEVKFNWYVDGVEVHNAKTKPREEQYNSTYRVVSVLTVLHQDWLNGKEYKCKVSNKALPAPIEKTISKAKGQPREPMVFDLPPSREEMTKNQVSLWCMVKGFYPSDIAVEWESNGQPENNYKTTPPVLDSDGSFFLYSKLTVDKSRWQQGNVFSCSVMHEALHNHYTQKSLSLSPGKSGSETPGTSESATPESGGGEVQLVESGGGLVQPGGSLRLSCAASGFNISYSSIHWVRQAPGKGLEWVAYISSYYGYTYYADSVKGRFTISADTSKNTAYLQMNSLRAEDTAVYYCARAHYFPWAGAMDYWGQGTLVTVSSGGGGSDIQMTQSPSSLSASVGDRVTITCRASQSVSSAVAWYQQKPGKAPKLLIYSASSLYSGVPSRFSGSRSGTDFTLTISSLQPEDFATYYCQQYYWPITFGQGTKVEIK

SEQ ID NO: 1023 - protein, 742 aa, Artificial Sequence
  Description of Artificial Sequence: Synthetic polypeptide
MNLLLILTFVAAAVAEFEVQLVESGGGLVQPGGSLRLSCAASGFNISYSSIHWVRQAPGKGLEWVASIYPSYSSTYYADSVKGRFTISADTSKNTAYLQMNSLRAEDTAVYYCARYYAMDYWGQGTLVTVSSGGGGSDIQMTQSPSSLSASVGDRVTITCRASQSVSSAVAWYQQKPGKAPKLLIYSASSLYSGVPSRFSGSRSGTDFTLTISSLQPEDFATYYCQQAFYYPITFGQGTKVEIKLEDKTHTKVEPKSSDKTHNCPPCPAPELLGGPSVFLFPPKPKDTLMISRTPEVTCVVVDVSHEDPEVKFNWYVDGVEVHNAKTKPREEQYNSTYRVVSVLTVLHQDWLNGKEYKCKVSNKALPAPIEKTISKAKGQPREPQVYTLPPIRELMTSNQVSLSCAVKGFYPSDIAVEWESNGQPENNYKTTPPVLDSDGSFFLVSKLTVDKSRWQQGNVFSCSVMHEALHNHYTQKSLSLSPGKSGSETPGTSESATPESGGGEVQLVESGGGLVQPGGSLRLSCAASGFNISSYYIHWVRQAPGKGLEWVASIYSSYGYTSYADSVKGRFTISADTSKNTAYLQMNSLRAEDTAVYYCARTVRGSKKPYFSGWAMDYWGQGTLVTVSSGGGGSDIQMTQSPSSLSASVGDRVTITCRASQSVSSAVAWYQQKPGKAPKLLIYSASSLYSGVPSRFSGSRSGTDFTLTISSLQPEDFATYYCQQYSWGPFTFGQGTKVEIK

SEQ ID NO: 1024 - protein, 739 aa, Artificial Sequence
  Description of Artificial Sequence: Synthetic polypeptide
MNLLLILTFVAAAVAEFEVQLVESGGGLVQPGGSLRLSCAASGFNISSSSMHWVRQAPGKGLEWVASIYSYYGSTYYADSVKGRFTISADTSKNTAYLQMNSLRAEDTAVYYCARWYGMDYWGQGTLVTVSSGGGGSDIQMTQSPSSLSASVGDRVTITCRASQSVSSAVAWYQQKPGKAPKLLIYSASSLYSGVPSRFSGSRSGTDFTLTISSLQPEDFATYYCQQPGSWYFPPITFGQGTKVEIKLEDKTHTKVEPKTSDKTHTCPPCPAPELLGGPSVFLFPPKPKDTLMISRTPEVTCVVVDVSHEDPEVKFNWYVDGVEVHNAKTKPREEQYNSTYRVVSVLTVLHQDWLNGKEYKCKVSNKALPAPIEKTISKAKGQPREPMVFDLPPSREEMTKNQVSLWCMVKGFYPSDIAVEWESNGQPENNYKTTPPVLDSDGSFFLYSKLTVDKSRWQQGNVFSCSVMHEALHNHYTQKSLSLSPGKSGSETPGTSESATPESGGGEVQLVESGGGLVQPGGSLRLSCAASGFNISYSSIHWVRQAPGKGLEWVAYISSYYGYTYYADSVKGRFTISADTSKNTAYLQMNSLRAEDTAVYYCARAHYFPWAGAMDYWGQGTLVTVSSGGGGSDIQMTQSPSSLSASVGDRVTITCRASQSVSSAVAWYQQKPGKAPKLLIYSASSLYSGVPSRFSGSRSGTDFTLTISSLQPEDFATYYCQQYYWPITFGQGTKVEIK

SEQ ID NO: 1025 - protein, 745 aa, Artificial Sequence
  Description of Artificial Sequence: Synthetic polypeptide
MNLLLILTFVAAAVAEFEVQLVESGGGLVQPGGSLRLSCAASGFNISSSSMHWVRQAPGKGLEWVASIYSYYGSTYYADSVKGRFTISADTSKNTAYLQMNSLRAEDTAVYYCARWYGMDYWGQGTLVTVSSGGGGSDIQMTQSPSSLSASVGDRVTITCRASQSVSSAVAWYQQKPGKAPKLLIYSASSLYSGVPSRFSGSRSGTDFTLTISSLQPEDFATYYCQQPGSWYFPPITFGQGTKVEIKLEDKTHTKVEPKSSDKTHNCPPCPAPELLGGPSVFLFPPKPKDTLMISRTPEVTCVVVDVSHEDPEVKFNWYVDGVEVHNAKTKPREEQYNSTYRVVSVLTVLHQDWLNGKEYKCKVSNKALPAPIEKTISKAKGQPREPQVYTLPPIRELMTSNQVSLSCAVKGFYPSDIAVEWESNGQPENNYKTTPPVLDSDGSFFLVSKLTVDKSRWQQGNVFSCSVMHEALHNHYTQKSLSLSPGKSGSETPGTSESATPESGGGEVQLVESGGGLVQPGGSLRLSCAASGFNISSYYIHWVRQAPGKGLEWVASIYSSYGYTSYADSVKGRFTISADTSKNTAYLQMNSLRAEDTAVYYCARTVRGSKKPYFSGWAMDYWGQGTLVTVSSGGGGSDIQMTQSPSSLSASVGDRVTITCRASQSVSSAVAWYQQKPGKAPKLLIYSASSLYSGVPSRFSGSRSGTDFTLTISSLQPEDFATYYCQQYSWGPFTFGQGTKVEIK

SEQ ID NO: 1026 - protein, 740 aa, Artificial Sequence; identical to SEQ ID NO: 995
  Description of Artificial Sequence: Synthetic polypeptide

SEQ ID NO: 1027 - protein, 746 aa, Artificial Sequence; identical to SEQ ID NO: 994
  Description of Artificial Sequence: Synthetic polypeptide

SEQ ID NO: 1028 - protein, 746 aa, Artificial Sequence
  Description of Artificial Sequence: Synthetic polypeptide
MNLLLILTFVAAAVAEFEVQLVESGGGLVQPGGSLRLSCAASGFNISYYYIHWVRQAPGKGLEWVASIYPSSGYTYYADSVKGRFTISADTSKNTAYLQMNSLRAEDTAVYYCARSSFYWAMDYWGQGTLVTVSSGGGGSDIQMTQSPSSLSASVGDRVTITCRASQSVSSAVAWYQQKPGKAPKLLIYSASSLYSGVPSRFSGSRSGTDFTLTISSLQPEDFATYYCQQSYAAYLFTFGQGTKVEIKLEDKTHTKVEPKSSDKTHNCPPCPAPELLGGPSVFLFPPKPKDTLMISRTPEVTCVVVDVSHEDPEVKFNWYVDGVEVHNAKTKPREEQYNSTYRVVSVLTVLHQDWLNGKEYKCKVSNKALPAPIEKTISKAKGQPREPQVYTLPPIRELMTSNQVSLSCAVKGFYPSDIAVEWESNGQPENNYKTTPPVLDSDGSFFLVSKLTVDKSRWQQGNVFSCSVMHEALHNHYTQKSLSLSPGKSGSETPGTSESATPESGGGEVQLVESGGGLVQPGGSLRLSCAASGFNISSYYIHWVRQAPGKGLEWVASIYSSYGYTSYADSVKGRFTISADTSKNTAYLQMNSLRAEDTAVYYCARTVRGSKKPYFSGWAMDYWGQGTLVTVSSGGGGSDIQMTQSPSSLSASVGDRVTITCRASQSVSSAVAWYQQKPGKAPKLLIYSASSLYSGVPSRFSGSRSGTDFTLTISSLQPEDFATYYCQQYSWGPFTFGQGTKVEIK

SEQ ID NO: 1029 - protein, 740 aa, Artificial Sequence
  Description of Artificial Sequence: Synthetic polypeptide
MNLLLILTFVAAAVAEFEVQLVESGGGLVQPGGSLRLSCAASGFNISYYYIHWVRQAPGKGLEWVASIYPSSGYTYYADSVKGRFTISADTSKNTAYLQMNSLRAEDTAVYYCARSSFYWAMDYWGQGTLVTVSSGGGGSDIQMTQSPSSLSASVGDRVTITCRASQSVSSAVAWYQQKPGKAPKLLIYSASSLYSGVPSRFSGSRSGTDFTLTISSLQPEDFATYYCQQSYAAYLFTFGQGTKVEIKLEDKTHTKVEPKTSDKTHTCPPCPAPELLGGPSVFLFPPKPKDTLMISRTPEVTCVVVDVSHEDPEVKFNWYVDGVEVHNAKTKPREEQYNSTYRVVSVLTVLHQDWLNGKEYKCKVSNKALPAPIEKTISKAKGQPREPMVFDLPPSREEMTKNQVSLWCMVKGFYPSDIAVEWESNGQPENNYKTTPPVLDSDGSFFLYSKLTVDKSRWQQGNVFSCSVMHEALHNHYTQKSLSLSPGKSGSETPGTSESATPESGGGEVQLVESGGGLVQPGGSLRLSCAASGFNISYSSIHWVRQAPGKGLEWVAYISSYYGYTYYADSVKGRFTISADTSKNTAYLQMNSLRAEDTAVYYCARAHYFPWAGAMDYWGQGTLVTVSSGGGGSDIQMTQSPSSLSASVGDRVTITCRASQSVSSAVAWYQQKPGKAPKLLIYSASSLYSGVPSRFSGSRSGTDFTLTISSLQPEDFATYYCQQYYWPITFGQGTKVEIK

1. A tetravalent binding antibody molecule comprising:
(a) an Fc domain or fragment thereof comprising a constant heavy chain domain 3 (CH3),
(b) a bivalent low-density lipoprotein receptor-related protein (LRP) binding domain, and
(c) a bivalent Frizzled (FZD) binding domain,
wherein the LRP binding domain is attached to one terminus of the Fc domain and the FZD binding domain is attached to the other end of the Fc domain,
wherein the LRP binding domain is selected from the group consisting of: a diabody that binds LRP5, a diabody that binds LRP6, two scFv that bind LRP5, two scFv that bind LRP6, two Fab that bind LRP5, and two Fab that bind LRP6 and combinations thereof; and
wherein the FZD binding domain is selected from the group consisting of: a diabody that binds one or more FZD, two scFv that bind one or more FZD, two Fab that bind one or more FZD wherein the FZD is a Frizzled Class Receptor 1 (FZD1), Frizzled Class Receptor 2 (FZD2), Frizzled Class Receptor 3 (FZD3), Frizzled Class Receptor 5 (FZD4), Frizzled Class Receptor 5 (FZD5), Frizzled Class Receptor 6 (FZD6), Frizzled Class Receptor 7 (FZD7), Frizzled Class Receptor 8 (FZD8), Frizzled Class Receptor 9 (FZD9), or Frizzled Class Receptor 10 (FZD10)
wherein when the LRP binding domain binds only LRP5, the FZD binding domain binds a FZD selected from the group consisting of FZD1, FZD2, FZD3, FZD5, FZD6, FZD7, FZD8, FZD9, FZD10, and combinations thereof.

2. The tetravalent binding antibody molecule of claim 1, wherein
(a) the LRP binding domain diabody is attached to the N-terminal of the Fc domain, and
(b) the FZD binding domain is attached to the C-terminal of the Fc domain.

3. The tetravalent binding antibody molecule of claim 2, wherein
(a) the LRP binding domain diabody is attached to the N-terminal of the Fc domain via a VL or VH of the diabody, and
(b) the FZD binding domain comprises two FZD binding Fab fused to the C-terminal of the Fc, wherein each Fab is attached to the Fc domain via a heavy or light chain variable domain (VH or VL) of the Fab linked to the CH3 domain of the Fc domain.

4. The tetravalent binding antibody molecule of claim 1, wherein the FZD binding domain is attached to the N-terminal of the Fc domain and the LRP binding domain is attached to the C-terminal of the Fc domain.

5. The tetravalent binding antibody molecule of claim 4, wherein
(a) the FZD binding domain comprises two Fabs that bind the FZD, wherein each Fab is attached to N-terminal of the Fc domain via a heavy or light chain variable domain (VH or VL) of the Fab linked to the CH2 domain of the Fc domain, and
(b) the LRP binding domain comprises a diabody or two scFv that bind LRP5 and/or LRP6, wherein the diabody or two scFv are attached to the C-terminal of the Fc domain via a VL or VH of the diabody or scFv linked to the CH3 of the Fc domain.

6. The tetravalent binding antibody molecule of claim 1, wherein the LRP binding domain and/or the FZD binding domain is bispecific.

7. The tetravalent binding antibody molecule of claim 6 wherein the LPR binding domain binds to LRP5 and LRP6.

8. The tetravalent binding antibody molecule of claim 7 wherein the LPR binding domain binds to a Wnt3A site (E3E4 domains) on LRP5 and a Wnt3A site (E3E4 domains) on LRP6.

9. The tetravalent binding antibody molecule of claim 1, wherein
(a) the diabody of the LRP binding domain binds LRP5 and comprises heavy chain complementary determining regions CDR-H1, CDR-H2 and CDR-H3 and light chain complementary determining regions CDR-L1, CDR-L2 and CDR-L3, of an antibody of Table 3 or Table 6, or
(b) the diabody of the LRP binding domain binds LRP6 and comprises heavy chain complementary determining regions CDR-H1, CDR-H2 and CDR-H3 and light chain complementary determining regions CDR-L1, CDR-L2 and CDR-L3 of an antibody of Table 4 or Table 6, or
(c) the diabody of the LRP binding domain binds LRP5 and LRP6, the diabody comprising CDR-H1, CDR-H2 and CDR-H3 and CDR-L1, CDR-L2 and CDR-L3 of an antibody of Table 3 or Table 6 and CDR-H1, CDR-H2 and CDR-H3 and CDR-L1, CDR-L2 and CDR-L3 of an antibody of Table 4.

10. The tetravalent binding antibody molecule of claim 1 wherein the Fc domain or fragment thereof is in a knob-in-hole configuration.

11. The tetravalent binding antibody molecule of claim 1, wherein the Fc domain lacks one or more effector functions.

12. The tetravalent binding antibody molecule of claim 1, wherein the LRP binding domain and FZD binding domain are each attached to the Fc domain by a linker.

13. The tetravalent binding antibody molecule of claim 12, wherein the linker comprises 1 to 100, 1 to 50, 1-30, 1-25, 1-10, 1-6 amino acids, 1-5 amino acids, or 2-4 amino acids.

14. The tetravalent binding antibody molecule of claim 1, wherein the LRP binding domain binds LRP6 or binds LRP5 and LRP6, and the FZD binding domain binds a FZD selected from the group consisting of: FZD1, FZD2, FZD3, FZD4, FZD5, FZD6, FZD7, FZD8, FZD9, and FZD10.

15. The tetravalent binding antibody molecule of claim 14, wherein the FZD binding domain binds FZD4 or FZD5.

16. The tetravalent binding antibody molecule of claim 15, wherein the FZD binding domain comprises two Fabs that bind FZD4 or FZD5 or multiple FZD.

17. The tetravalent binding antibody molecule of claim 16, wherein the FZD-binding Fab comprise light chain complementary determining regions CDR-L1, CDR-L2 and CDR-L3 and heavy chain CDRs, CDR-H1, CDR-H2 and CDR-H3 of an antibody of Table 1, Table 2 or Table 6.

18. The tetravalent binding antibody molecule of claim 15, wherein the LRP binding diabody binds to a Wnt3A site on LRP5 and a Wnt 3A site on LRP6.

19. The tetravalent binding antibody molecule of claim 1, wherein
(a) the diabody of the LRP binding domain binds LRP5 comprises heavy chain complementary determining regions CDR-H1, CDR-H2 and CDR-H3 and light chain complementary determining regions CDR-L1, CDR-L2 and CDR-L3, of an antibody of Table 3 or Table 6, or
(b) the diabody of the LRP binding domain binds LRP6 and comprises heavy chain complementary determining regions CDR-H1, CDR-H2 and CDR-H3 and light chain complementary determining regions CDR-L1, CDR-L2 and CDR-L3 of an antibody of Table 4 or Table 6, or
(c) the diabody of the LRP binding domain binds LRP5 and LRP6, the diabody comprising
(i) CDR-H1, CDR-H2 and CDR-H3 and CDR-L1, CDR-L2 and CDR-L3 of an antibody of Table 3 or Table 6, and
(ii) CDR-H1, CDR-H2 and CDR-H3 and CDR-L1, CDR-L2 and CDR-L3 of an antibody of Table 4 or Table 6.

20. The tetravalent binding antibody molecule of claim 3 comprising,
(a) a dimer of a first and second heavy chain monomer, each monomer comprising a single-chain polypeptide comprising, from N-terminus to C-terminus:
(1) a peptide comprising a heavy chain variable domain (VH) that binds LRP5 and/or LRP6 and a light chain variable domain (VL) that binds LRP5 and/or LRP6
(2) an Fc region, or fragment thereof comprising the CH3,
(3) a VH that binds FZD4, FZD5, or FZD4 and/or FZD5 and one or more other FZD, and
(4) a constant heavy chain domain 1 (CH1),
wherein
(5) the VH that binds LRP5 comprises heavy chain CDRs (CDR-H1, CDR-H2 and CDR-H3), of an antibody of Table 3 or Table 6, or the VH that binds LRP6 comprises the CDR-H1, CDR-H2 and CDR-H3 of an antibody of Table 4 or Table 6, and
(b) the VL that binds LRP5 comprises light chain CDRs (CDR-L1, CDR-L2 and CDR-L3), of an antibody of Table 3 or Table 6, or the VL that binds LRP6 comprises the CDR-L1, CDR-L2 and CDR-L3 of an antibody of Table 4 or Table 6, and
(c) the VH that binds FZD4, FZD5, or FZD4 and/or FZD5 and one or more other FZD comprises the heavy chain CDRs (CDR-H1, CDR-H2 and CDR-H3), of an antibody of Table 1, Table 2 or Table 6, and
(d) a third and fourth light chain monomer each comprising from N terminus to C terminus a VL that binds FZD4, FZD5, or FZD4 and/or FZD5 and one or more other FZD and a constant light chain domain 1 (CL1), the VL that binds FZD4, FZD5, or FZD4 and/or FZD5 and one or more other FZD comprises the light chain CDRs (CDR-L1, CDR-L2 and CDR-L3), of an antibody of Table 1, Table 2 or Table 6,
wherein the first and second heavy chain monomer dimerize via their Fc regions and the VL and VH that bind LRP5 or LRP6 of the first monomer pair with the VH and VL that bind LRP5 or LRP6 of the second monomer forming a bivalent diabody that binds LRP5 or LRP6, and
the CL1 and VLs that bind FZD4, FZD5, or FZD4 and/or FZD5 and one or more other FZD of the third and fourth light chain monomers pair with the CH1 and VHs that bind FZD4, FZD5, or FZD4 and/or FZD5 and one or more other FZD of the first and second heavy chain monomers forming two Fabs that bind FZD4, FZD5, or FZD4 and/or FZD5 and one or more other FZD, wherein the diabody forms the N-terminal bivalent LRP5 or LRP6 binding domain and the two Fab form the C-terminal bivalent FZD4, FZD5, or FZD4 and/or FZD5 and one or more other FZD binding domain.

21. The tetravalent binding antibody molecule of claim 20, wherein the LRP binding diabody is bispecific, wherein
the CDRs of the VHs that bind LRP5 or LRP6 of the first heavy chain monomer and the CDRs of the VHs that bind LRP5 or LRP6 of the second heavy chain monomer are non-identical, and
the CDRs of the VLs that bind LRP5 and LRP6 of the first heavy chain monomer and the CDRs of the VLs that bind LRP5 and LRP6 second heavy chain monomer are non-identical.

22. The tetravalent binding antibody molecule of claim 20, wherein the first and second monomers dimerize via a knob-in-hole configuration of the Fc regions or fragments thereof.

23. The tetravalent binding antibody molecule of claim 20, wherein the Fc domain lacks one or more effector functions.

24. The tetravalent binding antibody molecule of claim 20, wherein the peptide of (a)(1) is linked to the Fc region by a first peptide linker, and the Fc region is linked to the VH that binds FZD4 or FZD5 or to multiple FZD (pan-FZD) by a second peptide linker and the VH that binds FZD4 or FZD5 or to multiple FZD (pan-FZD) is linked to the CH1 by a third peptide linker, and the VL that binds FZD4 or FZD5 or to multiple FZD (pan-FZD) is linked to the CL1 domain by a peptide linker.

25. The tetravalent binding antibody molecule of claim 24, wherein one or more of the second, third or fourth peptide linker comprises 1 to 100, 1 to 50, 1-30, 1-25, 1-10 or 1-5 amino acids.

26. The tetravalent binding antibody molecule of claim 20, wherein in each first and second heavy chain monomer, the VH that binds to LRP5 or LRP6 is linked to the VL that binds to LRP5 or LRP6 by a peptide linker.

27. The tetravalent binding antibody molecule of claim 26, wherein the peptide linker comprises 1-6 amino acids, 1-5 amino acids, or 2-4 amino acids.

28. The tetravalent binding antibody molecule of claim 20 wherein the tetravalent binding antibody molecule does not comprise a FZD binding domain comprising the CDRs of the FZD-binding antibody 5044 in combination with the Wnt co-receptor binding domain comprising the CDRs of LRP6-binding antibody 2542 and/or antibody 2539.

29. The tetravalent binding antibody molecule of claim 20, wherein the tetravalent binding antibody molecule comprises
(a) a first heavy chain comprising the amino acid sequence of the hole heavy chain construct of FZD5-LRP6 of Table 11, a second heavy chain comprising the amino acid sequence of the knob heavy chain construct of FZD5-LRP6 of Table 11 and a light chain comprising the amino acid sequence of the light chain construct of LRP6 of Table 11 wherein the amino acid sequence of the CDRs are the amino acid sequence of the CDRs of ANT59, or
(b) a first heavy chain comprising the amino acid sequence of the hole heavy chain construct of pFZD-LRP6 of Table 11, a second heavy chain comprising the amino acid a knob heavy chain construct of pFZD-LRP6 of Table 11 and a light chain comprising the amino acid sequence of the light chain construct of pFZD-LRP6 of Table 11 wherein the amino acid sequence of the CDRs are the amino acid sequence of the CDRs of ANT9.

30. A tetravalent binding antibody molecule having an N-terminal FZD4 or FZD5 binding domain comprising two FZD4-binding or two FZD5-binding Fabs and a C-terminal LRP binding domain comprising two LRP binding scFvs, the tetravalent binding antibody molecule comprising
(a) a dimer of a first and second heavy chain monomer, wherein each monomer comprises a single-chain polypeptide comprising, from N-terminus to C-terminus:
(i) a first heavy chain variable domain (VH) that binds FZD 4 or 5
(ii) a heavy chain constant region domain 1 (CH1 domain)
(iii) an Fc region or fragment thereof comprising a constant heavy chain domain 3 (CH3 domain),
(iv) a peptide comprising a VH that binds LRP5 or LRP6, and a first light chain variable domain (VL) that binds LRP5 or LRP6, and
(b) a third and fourth light chain monomer each monomer comprising from N terminus to C terminus a second VL that binds the FZD and a constant light chain domain 1 (CL1 domain),
wherein the first and second heavy chain monomers dimerize via the Fc regions or fragments thereof,
wherein the first VH that binds FZD4 or FZD5 and CH1 domain of the first and second monomer pairs with the second VL and CL1 domain of the third and fourth monomers forming two Fabs that bind FZD4 or FZD5, and the second VH and first VL of each heavy chain monomer pair to form a scFv that binds LRP5 or LRP6,
wherein the LRP binding scFvs form a C-terminal LRP binding domain of the tetravalent binding antibody molecule and the FZD4 or FZD5 binding Fabs form an N-terminus FZD4 or FZD5-binding domain of the tetravalent binding antibody molecule, wherein when the LRP binding domain binds only LRP5, the FZD binding domain binds FZD5.

31. The tetravalent binding antibody molecule of claim 30, wherein
the VH that binds FZD4 or FZD5 comprises the heavy chain CDRs (CDR-H1, CDR-H2 and CDR-H3), of an antibody of Table 1, Table 2 or Table 6,
the VH that binds LRP5 comprises heavy chain CDRs (CDR-H1, CDR-H2 and CDR-H3), of an antibody of Table 3 or Table 6, or the VH that binds LRP6 comprises the CDR-H1, CDR-H2 and CDR-H3 of an antibody of Table 4, and
the VL that binds LRP5 comprises light chain CDRs (CDR-L1, CDR-L2 and CDR-L3), of an antibody of Table 3 or Table 6, or the VL that binds LRP6 comprises the CDR-L1, CDR-L2 and CDR-L3 of an antibody of Table 4.

32. A tetravalent binding antibody molecule comprising an N-terminal LRP binding diabody and a C-terminal domain comprising two FZD4-binding or FZD5-binding scFv, the tetravalent binding antibody molecule comprising
a dimer of a first and second monomer, wherein each monomer comprises a single-chain polypeptide comprising, from N-terminus to C-terminus:
(a) a first peptide, said first peptide comprising a first heavy chain variable domain (VH) and a first light chain variable (VL) domain that bind LRP5 or LRP6,
(b) an Fc region, or fragment thereof comprising a constant heavy chain domain 3 (CH3), and
(c) a second peptide, said second peptide comprising a second VL and a second VH that bind a FZD4 or FZD5,
wherein the first and second monomers dimerize via the Fc regions or fragments thereof, the first VH and VL of each monomer pairs with the first VH and VL of the other monomer forming a diabody that binds LRP5 or LRP6 and the second VL and VH of each monomer pair to form a scFvs that bind FZD4 or FZD5,
wherein the LRP binding diabody forms the N-terminal LRP binding domain of the tetravalent binding antibody molecule and the two FZD4-binding or FZD5-binding scFvs form the C-terminal FZD-binding domain of the tetravalent binding antibody molecule wherein when the LRP binding domain binds only LRP5, the FZD binding domain binds FZD5.

33. The tetravalent binding antibody molecule of claim 32, wherein
the VH that binds LRP5 comprises heavy chain CDRs (CDR-H1, CDR-H2 and CDR-H3), of an antibody of Table 3 or Table 6, or the VH that binds LRP6 comprises the CDR-H1, CDR-H2 and CDR-H3 of an antibody of Table 4,
the VL that binds LRP5 comprises light chain CDRs (CDR-L1, CDR-L2 and CDR-L3), of an antibody of Table 3 or Table 6, or the VL that binds LRP6 comprises the CDR-L1, CDR-L2 and CDR-L3 of an antibody of Table 4, and
the VH that binds FZD comprises the heavy chain CDRs (CDR-H1, CDR-H2 and CDR-H3), of an antibody of Table 1, Table 2 or Table 6.

34. A tetravalent binding antibody molecule in a Diabody-Fc-scFv format comprising an Fc domain, a LRP5/6 co-receptor binding domain including a bispecific diabody that binds at least two sites on the co-receptor,
wherein the diabody is attached to the amino terminus of the Fc domain and a FZD binding domain is attached to the carboxy terminus of the Fc domain comprising two scFv fragments each binding FZD wherein the scFv is specific for FZD5, or pan-specific binding to FZD5 and one or more other FZD.

35. A tetravalent binding antibody molecule in an IgG-diabody format having an Fc domain, a FZD binding domain that comprises of two Fab fragments attached to the N-terminus of the Fc domain, each Fab binding to an FZD5, or FZD4 and FZD5 and a LRP5/6 co-receptor binding domain attached to the C-terminus of the Fc domain that is composed of a diabody that binds at least two sites on the co-receptor LRP5/6, wherein the Fabs are specific for FZD5 or pan-specific, binding to FZD5 and one or more FZD.

36. A tetravalent binding antibody molecule in an IgG-Diabody format comprising an Fc domain, an N-terminal binding domain for a FZD, wherein the FZD-binding Fabs bind FZD5 or FZD5 and at least one other FZD and a C-terminal binding domain for a LRP5/6 co-receptor and including a LRP5/6 coreceptor-binding diabody.

37. The tetravalent binding antibody molecule of claim 36, comprising:
a first and second heavy chain monomer, wherein each heavy chain monomer includes a single-chain polypeptide from N-terminus to C-terminus:
(a) a heavy chain variable domain (VH) that binds FZD5 or FZD4 and FZD5, linked to
(b) a heavy chain constant region domain 1 (CH1 domain), linked to
(c) an Fc region (or fragment thereof comprising a constant heavy chain domain 3 (CH3 domain)), linked to
(d) a peptide comprising a VH that binds a LRP5/6 co-receptor, linked to a light chain variable domain (VL) that binds a LRP5/6 co-receptor, and
a first and second light chain monomer, wherein each light chain monomer includes from N terminus to C terminus a VL that binds the FZD, linked to a constant light chain domain 1 (CL1 domain).

38. The tetravalent binding antibody molecule of claim 1, wherein the tetravalent binding antibody molecule comprises
(a) a first heavy chain comprising the amino acid sequence of the hole heavy chain construct of SEQ ID NO: 986, a second heavy chain comprising the amino acid a knob heavy chain construct of SEQ ID NO: 987 and a light chain comprising the amino acid sequence of the light chain construct of SEQ ID NO: 992 wherein the amino acid sequence of the CDRs are the amino acid sequence of the CDRs of ANT80; or
(b) a first heavy chain comprising the amino acid sequence of the hole heavy chain construct of SEQ ID NO: 988, a second heavy chain comprising the amino acid a knob heavy chain construct of SEQ ID NO: 989 and a light chain comprising the amino acid sequence of the light chain construct of SEQ ID NO: 992 wherein the amino acid sequence of the CDRs are the amino acid sequence of the CDRs of ANT 98; or
(c) a first heavy chain comprising the amino acid sequence of the hole heavy chain construct of SEQ ID NO: 990, a second heavy chain comprising the amino acid a knob heavy chain construct of SEQ ID NO: 991 and a light chain comprising the amino acid sequence of the light chain construct of SEQ ID NO: 992 wherein the amino acid sequence of the CDRs are the amino acid sequence of the CDRs of ANT99; or
(d) a first heavy chain comprising the amino acid sequence of the hole heavy chain construct selected from the group consisting of SEQ ID NO: 986, SEQ ID NO: 988, and SEQ ID NO: 990; a second heavy chain comprising the amino acid of a knob heavy chain construct selected from the group consisting of SEQ ID NO: 987, SEQ ID NO: 989, and SEQ ID NO: 991; and a light chain comprising the amino acid sequence of the light chain construct of SEQ ID NO: 992.

39. A pharmaceutical composition comprising a tetravalent binding antibody molecule of claim 1 and a pharmaceutically acceptable carrier.

40. A method for promoting endothelial cell barrier functions in a tissue comprising administering an effective amount of a tetravalent binding antibody molecule of claim 1 to a tissue.

41. The method of claim 40, wherein the tissue is brain, kidney or eye tissue.

42. The method of claim 41, wherein the tetravalent binding antibody molecule is administered to eye tissue by intravitreal injection.

43. A method for treating inflammatory bowel disease in a subject in need thereof comprising administering an effective amount of a tetravalent binding molecule of claim 1 to said subject.

44. A method for increasing retinal or brain endothelial cell barrier functions, decreasing endothelial cell permeability, enhancing or restoring blood retina and blood brain barrier maintenance in a subject in need thereof comprising contacting an endothelial cell comprising an FZD4 receptor and an LRP5 and/or LRP6 in a subject in need thereof with an effective amount of a tetravalent binding antibody molecule of claim 1.

45. The method of claim 43, wherein the tetravalent binding antibody molecule is administered to the subject in need thereof by injection, topically, or orally.

46. The method of claim 43, wherein the tetravalent binding antibody molecule is administered subcutaneously, intravenously, intraperitoneally, intrathecally, intravitreously or intraocularly.
